(19) United States
(12) Patent Application Publication
(10) Pub. No.: US 2021/0206856 A1
(43) Pub. Date: Jul. 8, 2021

(54) TARGETED IMMUNOTOLERANCE WITH A PD-1 AGONIST

(71) Applicant: Pandion Therapeutics, Inc., Watertown, MA (US)

(72) Inventors: Nathan Higginson-Scott, Boston, MA (US); Joanne L. Viney, Belmont, MA (US); Kevin Lewis Otipoby, Ashland, MA (US); Salvatore Alioto, Cambridge, MA (US); Lindsay J. Edwards, Cambridge, MA (US); Jacob Glanville, San Francisco, CA (US); David Maurer, San Francisco, CA (US); Sarah Ives, San Francisco, CA (US); Sawsan Youssef, San Francisco, CA (US); Devanshi Shanghavi, San Francisco, CA (US); Lauren Schwimmer, San Francisco, CA (US)

(21) Appl. No.: 16/997,238

(22) Filed: Aug. 19, 2020

Related U.S. Application Data
(60) Provisional application No. 63/027,449, filed on May 20, 2020.
(60) Provisional application No. 62/888,694, filed on Aug. 19, 2019.

(51) Int. Cl. C07K 16/28; A61P 37/06

(52) U.S. Cl. CPC C07K 16/2818; C07K 16/2803; A61P 37/06; C07K 2317/56; C07K 2317/75; C07K 2317/515; C07K 2317/622; C07K 2317/565; C07K 2317/31; C07K 2317/51

(57) ABSTRACT

Methods and polypeptides for conferring site-specific or local immune privilege.

### CROSS-REFERENCE TO RELATED APPLICATIONS

[0001] This application is related to U.S. Provisional Application No. 62/721,644, filed Aug. 23, 2018, U.S. provisional Application No. 62/675,972 filed May 24, 2018, U.S. provisional Application No. 62/595,357 filed Dec. 6, 2017, U.S. Provisional Application No. 62/595,348, filed Dec. 6, 2017, U.S. Non-Provisional application Ser. No. 16/109,875, filed Aug. 23, 2018, U.S. Non-Provisional application Ser. No. 16/109,897, filed Aug. 23, 2018, U.S. Non-Provisional application Ser. No. 15/988,311, filed May 24, 2018, PCT Application No. PCT/US2018/034334, filed May 24, 2018, and, PCT/US2018/062780, filed Nov. 28, 2018, each of which are hereby incorporated by reference in their entirety.

### FIELD

[0002] The embodiments provided herein relate to, for example, methods and compositions for local or targeted immune-privilege.

### BACKGROUND

[0003] Instances of unwanted immune responses, e.g., as in the rejection of transplanted tissue or in autoimmune disorders, constitute a major health problem for millions of people across the world. Long-term outcomes for organ transplantation are frequently characterized by chronic rejection, and eventual failure of the transplanted organ. More than twenty autoimmune disorders are known, affecting essentially every organ of the body, and affecting over fifty million people in North America alone. The broadly active immunosuppressive medications used to combat the pathogenic immune response in both scenarios have serious side effects.

### SUMMARY

[0004] Disclosed herein are methods and therapeutic compounds that provide site-specific immune privilege. Embodiments disclosed herein are incorporated by reference into this section.

[0005] In some embodiments, the therapeutic compound comprises an engineered multi-specific compound, e.g., an engineered bispecific molecule, e.g., an engineered bispecific antibody molecule, comprising:

[0006] 1) a specific targeting moiety selected from:

[0007] a) a donor specific targeting moiety which, e.g., preferentially binds a donor target (preferentially as compared with binding to a recipient antigen), and is useful for providing site-specific immune privilege for a transplant tissue, e.g., an organ, from a donor; or

[0008] b) a tissue specific targeting moiety which, e.g., preferentially binds a subject target tissue (preferentially as compared with subject non-target tissue), and is useful for providing site-specific immune privilege for a subject tissue undergoing unwanted immune attack, e.g., in an autoimmune disorder; and

[0009] 2) an effector binding/modulating moiety selected from:

[0010] (a) an immune cell inhibitory molecule binding/modulating moiety (referred to herein as an ICIM binding/modulating moiety);

[0011] (b) an immunosuppressive immune cell binding/modulating moiety (referred to herein as an IIC binding/modulating moiety);

[0012] (c) an effector binding/modulating moiety that, as part of a therapeutic compound, promotes an immunosuppressive local microenvironment, e.g., by providing in the proximity of the target, a substance that inhibits or minimizes attack by the immune system of the target (referred to herein as an SM binding/modulating moiety); or

[0013] (d) an immune cell stimulatory molecule binding/modulating moiety (referred to herein as an ICSM binding/modulating moiety), wherein the ICSM inhibits immune activation by, for example, blocking the interaction between a costimulatory molecule and its counterstructure.

[0014] An effector binding/modulating moiety can fall into more than one of classes a, b and c. E.g., as is shown below, a CTLA-4 binding molecule falls into both of categories a and b.

[0015] In some embodiments, the therapeutic compound comprises an ICIM binding/modulating moiety. In some embodiments, an ICIM binding/modulating molecule and binds, and agonizes, an inhibitory molecule, e.g., an inhibitory immune checkpoint molecule, or otherwise inhibits or reduces the activity of an immune cell, e.g., a cytotoxic T cell, a B cell, NK cell, or a myeloid cell, e.g., a neutrophil or macrophage.

[0016] In some embodiments, the therapeutic compound comprises an engineered multi-specific compound, e.g., an engineered bispecific molecule, e.g., an engineered bispecific antibody molecule, comprising:

[0017] 1) a specific targeting moiety, e.g., a donor specific targeting moiety (which binds a donor target and is useful for providing site-specific immune privilege for a transplant tissue, e.g., an organ, from a donor) or a tissue specific targeting moiety (which binds a subject tissue target and is useful for providing site-specific immune privilege for a subject tissue undergoing unwanted immune attack, e.g., in an autoimmune disorder); and

[0018] 2) an effector binding/modulating moiety comprising an ICIM binding/modulating moiety that binds to an effector molecule on an immune cell, e.g., an inhibitory receptor, e.g., PD-1, wherein, upon binding of the specific targeting moiety to its target, and binding of the ICIM binding/modulating moiety to an effector molecule on the immune cell, an immune cell activity, e.g., the ability of the immune cell to mount an immune attack, is down regulated, e.g., through an inhibitory signal dependent on the clustering of effector molecules on the immune cell. In some embodiments, the engineered multi-specific compound comprises additional binding moieties so that it binds more than two specific molecules, such as, but not limited to, 3 or 4.

[0019] In some embodiments, the therapeutic compound comprises an ICIM binding/modulating moiety and has one or both of the following properties: (a) the level of down regulation of an immune cell is greater when the therapeutic compound is bound to its target than when the therapeutic compound is not bound to its target; and (b) the therapeutic compound, when engaged with a cell surface inhibitory receptor, e.g., PD-1, on an immune cell, does not inhibit, or does not substantially inhibit the ability of the cell surface inhibitory receptor to bind an endogenous ligand.

[0020] In some embodiments, the level of down regulation of an immune cell is greater when the therapeutic compound is bound to its target than when the therapeutic compound is not bound to its target. In embodiments, the level of down regulation by target bound therapeutic compound is equal to or 1.5-fold, 2-fold, 4-fold, 8-fold or 10-fold greater than what is seen when it is not bound to its target. In embodiments, therapeutic compound does not, or does not significantly down regulate immune cells when it is not bound to target. Thus, indiscriminant or unwanted agonism of an inhibitory receptor, e.g., PD-1, is minimized or eliminated. E.g., when the therapeutic compound is bound to an immune cell, but not bound to the targeted moiety, engagement of a inhibitory immune checkpoint molecule by the therapeutic compound does not result in down regulation or does not result in substantial down regulation, e.g., the inhibitory receptor on the immune cell to which the therapeutic compound is bound, is not clustered or not clustered sufficiently to result in an inhibitory signal sufficient to give down regulation or substantial inhibition of the immune cell.

[0021] In embodiments, the therapeutic compound, when engaged with a cell surface inhibitory receptor, e.g., PD-1, on an immune cell, does not inhibit, or does not substantially inhibit the ability of the cell surface inhibitory receptor to bind an endogenous ligand. In some embodiments, the therapeutic compound can bind to the PD-L1/2 binding site on PD-1. Thus, indiscriminant or unwanted antagonism of an inhibitory receptor, e.g., PD-1, is minimized or eliminated. In embodiments, binding of the therapeutic compound to an inhibitory receptor, e.g. PD-1, on an immune cell does not impede, or substantially impede, the ability of the inhibitory receptor to bind a natural ligand, e.g., PD-L1. In embodiments, binding of the therapeutic compound to an inhibitory receptor, e.g. PD-1, on an immune cell reduces binding of a natural ligand, e.g., PD-L1, by less than 50, 40, 30, 20, 10, or 5% of what is seen in the absence of therapeutic compound. In some embodiments, the moiety is an antibody that binds to PD-1. In some embodiments, the antibody is a PD-1 agonist. In some embodiments, the antibody is not a PD-1 antagonist in a soluble PD-1 antagonist assay.

[0022] In some embodiments, the therapeutic compound comprises an ICIM binding/modulating moiety and, when administered to a subject at a therapeutically effective dose, does not result in unacceptable levels of systemic immune suppression, as would be possible if indiscriminant agonism of the inhibitory receptor in all immune cells of a type, e.g., all T cells, occurred, or unacceptable levels of systemic immune activation, as would be possible if the therapeutic compound antagonized the interaction of the inhibitory receptor with its natural ligand.

[0023] While not wishing to be bound by theory, it is believed that, upon administration to a subject, a therapeutic compound comprising an ICIM binding/modulating moiety can exist in any one of four states: i) unbound and in free solution; ii) bound to only an inhibitory receptor expressed on the surface of an immune cell, e.g., a T cell, through the ICIM binding/modulating moiety; iii) bound to only the surface of the target transplant or subject tissue through the targeting moiety; and iv) bound to both the surface of target transplant or subject tissue through the targeting moiety and to an inhibitory receptor expressed by an immune cell, e.g., a T cell, through the ICIM binding/modulating moiety. When the therapeutic compound is bound only to the target transplant or subject tissue through the targeting moiety (iii), it has no, or no substantial, effect on the target transplant or tissue. When the therapeutic compound is bound to the target transplant or tissue through the targeting moiety and bound to an inhibitory receptor expressed by an immune cell, e.g., a T cell, through the ICIM binding/modulating moiety (iv), it creates immune privilege at the target organ or tissue. While not wishing to be bound by theory, is believed that this is achieved by the target transplant or donor tissue multimerizing the therapeutic compound molecules on its surface, e.g., by immobilizing a plurality of therapeutic compound molecules at a high density and valency. The multimerization of the therapeutic compound molecules allows the ICIM binding/modulating moieties of the therapeutic compounds to promote clustering of inhibitory receptors expressed on the surface of the immune cell, e.g., a pathogenic T cell, and transmission of an inhibitory signal functioning to silence or down regulate the immune cell. E.g., in the case of T cells, a therapeutic compound comprising an ICIM binding/modulating moiety comprising a PD-L1 molecule, or an anti-PD-1 Ab (e.g. agonist anti-PD-1 Ab), can be used. Binding of a plurality of the therapeutic compound molecules to the target results in multimerization of the therapeutic compound molecules, which in turn, by virtue of the PD-L1 molecule, or a functional anti-PD-1 antibody molecule, leads to clustering of PD-1 on the T cell. If that clustering occurs in the context of antigen presentation by the target MEW, to T cell receptor on the T cell, a negative signal is generated and the T cell will be inactivated. In embodiments the ICIM binding/modulating moiety, e.g., a functional antibody molecule, binds the effector molecule but does not inhibit, or substantially inhibit, interaction of the effector molecule with its native ligand(s).

[0024] In some embodiments, the therapeutic compound comprises an IIC binding/modulating moiety, which binds and recruits an immune suppressive immune cell, e.g., a Treg, e.g., a Foxp3+CD25+ Treg, to the proximity of the target tissue.

[0025] In some embodiments, the therapeutic compound comprises a SM binding/modulating moiety, which modulates, e.g., binds and inhibits, sequesters, degrades or otherwise neutralizes a substance, e.g., a soluble molecule that modulates an immune response, e.g., ATP or AMP.

[0026] In some embodiments, the therapeutic compound comprises a targeting moiety that is specific for a target on an immune cell. In some embodiments, the target is as described herein. In some embodiments, the target is MAdCAM. In some embodiments, the targeting moiety is an antibody that binds to MAdCAM.

[0027] In some embodiments the therapeutic compound comprises an ICSM binding/modulating moiety, which binds a stimulatory molecule, e.g., a costimulatory molecule. In some embodiments, the ICSM inhibits the costimulatory molecule counterstructure. Binding/modulating either the costimulatory molecule or the costimulatory molecule counterstructure can serve to down regulate the ability of an immune cell to mount an immune response. In some embodiments, the ICSM binding/modulating moiety can bind a stimulatory, e.g., costimulatory molecule on an immune cell, e.g., OX40 on T cells, or the counter member of the stimulatory molecule e.g. OX40L on another cell, such as, but not limited to, immune cells such as NK cells, mast cells, dendritic cells, or, for example, non-immune cells such as endothelial cells, or smooth muscle cells.

[0028] In some embodiments, the therapeutic compound comprises a donor specific targeting moiety and provides site-specific immune privilege for donor transplant tissue implanted in a subject. In some embodiments, the therapeutic compound comprises a tissue specific targeting moiety and provides site-specific immune privilege for a tissue of a subject, e.g., a tissue afflicted with an unwanted immune response in an autoimmune disorder.

[0029] The targeting moiety is specific for the donor transplant or subject tissue to be protected from the immune system. In some embodiments, the effector molecule binding moiety comprises a de novo generated binding domain, e.g. a functional antibody molecule. In some embodiments, the effector binding/modulating moiety comprises amino acid sequence deriving from the natural ligand that recognizes an inhibitory receptor expressed on the surface of an immune cell, e.g., a T cell.

[0030] In some embodiments, the therapeutic compound silences immune cells, e.g., T cells, proximal to the transplant or donor tissue to be protected but does not silence immune cells, e.g., T cells, not proximal to the target, as the therapeutic compound requires the presence of the target transplant or donor tissue for function. This in contrast to when the therapeutic compound binds only to the inhibitory receptor expressed by the immune cell, e.g., T cell, in which case there is no functional consequence.

[0031] Methods and therapeutic compounds described here are based at least in part on providing site-specific immune-privilege. Therapeutic compounds and method of using them described herein allow the minimization, e.g., the reduction or elimination of, non-site-specific systemic administration of immune-suppressive therapeutic agents in clinical settings, e.g., where reversal and suppression of an immune response is desired, such as in autoimmune diseases or tissue, e.g., organ, transplant. While capable of clinically meaningful response when the underlying pathophysiology driven by an aberrant immune system is impacted, broadly acting immunosuppressants have the undesirable effect of reducing the patient's systemic immune system function. As the role of a normally functioning immune system is to combat the constant barrage of pathogenic and opportunistic organisms existing in the surrounding environment and to constantly purge healthy individuals of cancerous cells, patients undergoing chronic immunosuppression are at an increased risk to develop infections and cancer. Methods and therapeutic compounds described herein provide therapies that selectively target and attenuate, reduce, or extinguish only the pathogenic immune response at the site of pathology while having minimal inhibition of normal systemic immune system function elsewhere.

[0032] In some embodiments, a therapeutic compound is provided as provided herein. In some embodiments, the compound comprises a i) a specific targeting moiety selected from: a) a donor specific targeting moiety which, e.g., preferentially binds a donor target; or b) a tissue specific targeting moiety which, e.g., preferentially binds target tissue of a subject; and ii) an effector binding/modulating moiety selected from: (a) an immune cell inhibitory molecule binding/modulating moiety (ICIM binding/modulating moiety); (b) an immunosuppressive immune cell binding/modulating moiety (IIC binding/modulating moiety); or (c) an effector binding/modulating moiety that, as part of a therapeutic compound, promotes an immunosuppressive local microenvironment, e.g., by providing in the proximity of the target, a substance that inhibits or minimizes attack by the immune system of the target (SM binding/modulating moiety).

[0033] In some embodiments, the effector binding/modulating moiety comprises an ICIM binding/modulating moiety. In some embodiments, the effector binding/modulating moiety comprises an ICIM binding/modulating moiety comprising an inhibitory immune checkpoint molecule ligand molecule. In some embodiments, the inhibitory immune molecule counter-ligand molecule comprises a PD-L1 molecule. In some embodiments, the ICIM is wherein the inhibitory immune molecule counter ligand molecule engages a cognate inhibitory immune checkpoint molecule selected from PD-1, KIR2DL4, LILRB1, LILRB, or CTLA-4. In some embodiments, the ICIM is an antibody. In some embodiments, the ICIM comprises an antibody that binds to PD-1, KIR2DL4, LILRB1, LILRB, or CTLA-4. In some embodiments, the ICIM binding/modulating moiety which comprises a functional antibody molecule to a cell surface inhibitory molecule. In some embodiments, the antibody is an anti-PD-1 agonist Ab.

[0034] In some embodiments, the cell surface inhibitory molecule is an inhibitory immune checkpoint molecule. In some embodiments, the inhibitory immune checkpoint molecule is selected from PD-1, KIR2DL4, LILRB1, LILRB2, CTLA-4, or selected from Table 1.

[0035] In some embodiments, the effector binding/modulating moiety comprises an IIC binding/modulating moiety.

[0036] In some embodiments, the compound has the formula from N-terminus to C-terminus: R1-Linker Region A-R2 or R3-Linker Region B-R4, wherein, R1, R2, R3, and R4, each independently comprises an effector binding/modulating moiety, e.g., an ICIM binding/modulating moiety, an IIC binding/modulating moiety, ICSM binding/modulating moiety, or an SM binding/modulating moiety; a specific targeting moiety; or is absent; provided that an effector binding/modulating moiety and a specific targeting moiety are present.

[0037] In some embodiments, polypeptides comprising a targeting moiety that binds to a target cell and an effector binding/modulating moiety, wherein the effector binding/modulating moiety is a IL-2 mutein polypeptide (IL-2 mutein), which is a mutant IL-2 protein, are provided. In some embodiments, the targeting moiety comprises an antibody that binds to a target protein on the surface of a target cell. In some embodiments, the polypeptide comprises two polypeptide chains as provided for herein. In some embodiments, the first chain comprises a VH domain and the second chain comprises a VL domain of an antibody that binds to the target cell or a protein that is expressed on the target cell, such as, but not limited to, MAdCAM. In some embodiments, the targeting moiety is an antibody that binds to MAdCAM. In some embodiments, the targeting moiety binds to OAT1 (SLC22A6) or OCT2 (SLC22A2). In some embodiments, the targeting moiety is an antibody that binds to OAT1 (SLC22A6) or OCT2 (SLC22A2). In some embodiments, the targeting moiety does not bind to OAT1 (SLC22A6) or OCT2 (SLC22A2). For the avoidance of doubt, the OCT2 referenced herein is not the transcription factor, but rather is the surface protein expressed in kidney tissue. In some embodiments, the targeting moiety is a moiety that specifically binds to a protein found in the pancreas. In some embodiments, the targeting moiety binds to FXYD2, TSPAN7, DPP6, HEPACAM2, TMEM27, or GPR119. In some embodiments, the targeting moiety does not bind to FXYD2, TSPAN7, DPP6, HEPACAM2, TMEM27, or GPR119. In some embodiments, the targeting moiety is antibody that binds to FXYD2, TSPAN7, DPP6, HEPACAM2, TMEM27, or GPR119.

[0038] In some embodiments, the polypeptide comprises a first chain and a second chain that form the polypeptide or therapeutic compound, wherein

[0039] the first chain comprises:

[0040] V_{H}-H_{c}-Linker-C₁, wherein V_{H} is a variable heavy domain that binds to the target cell with a V_{L} domain of the second chain; H_{c} is a heavy chain of antibody comprising CH1-CH2-CH3 domain, the Linker is a glycine/serine amino acid sequence as provided herein or is absent, and C₁ is a IL-2 mutein that can be fused to a Fc protein in either the N-terminal or C-terminal orientation as provided for herein, wherein there can be a glycine/serine linker linking the IL-2 mutein to the Fc protein; and

[0041] the second chain comprises:

[0042] V_{L}-L_{c}, wherein V_{L} is a variable light chain domain that binds to the target cell with the V_{H} domain of the first chain, and the Lc domain is a light chain CK domain. In some embodiments, the first chain comprises C₁-Linker-V_{H}-H_{c}, with the variables as defined above.

[0043] In some embodiments, the polypeptide comprises the formula of C₁-linker-CH2-CH3-Linker-scFv, wherein C₁ and the Linker are as defined above and herein, the CH2 and CH3 are heavy chain domains and the scFv is a single chain antibody like fragment that acts as the targeting moiety to bind to tissue targets as provided for herein. In some embodiments, the mutein is fused to the Fc region as provided herein and one or more of the linkers are absent. In some embodiments, the Linker is a glycine/serine linker as provided for herein. In some embodiments, the linker is a peptide sequence.

[0044] In some embodiments, methods of treating autoimmune diseases or conditions are provided herein, the methods comprising administering one or more of the therapeutic compounds or polypeptides provided herein.

[0045] In some embodiments, methods of treating diseases or conditions described herein are provided herein, the methods comprising administering one or more of the therapeutic compounds or polypeptides provided herein.

[0046] In some embodiments, methods of treating a subject with inflammatory bowel disease are provided, the methods comprising administering a therapeutic compound or polypeptides provided herein to the subject to treat the inflammatory bowel disease. In some embodiments, the subject has Crohn's disease or ulcerative colitis.

[0047] In some embodiments, methods of treating a subject with autoimmune hepatitis are provided, the methods comprising administering a therapeutic compound or polypeptides as provided herein to the subject to treat the autoimmune hepatitis.

[0048] In some embodiments, methods of treating primary sclerosing cholangitis are provided, the methods comprising administering a therapeutic compound or polypeptides as provided herein to the subject to treat the primary sclerosing cholangitis.

[0049] In some embodiments, methods of treating (e.g., reducing) inflammation in the intestine are provided, the methods comprising administering a therapeutic compound or polypeptides as provided herein to the subject to treat the inflammation in the intestine. In some embodiments, the inflammation is in the small intestine. In some embodiments, the inflammation is in the large intestine. In some embodiments, the inflammation is in the bowel or colon.

[0050] In some embodiments, methods of treating (e.g., reducing) inflammation in the pancreas are provided, the methods comprising administering a therapeutic compound or polypeptides as provided herein to the subject to treat the inflammation in the pancreas. In some embodiments, the methods treat pancreatitis.

[0051] In some embodiments, methods of treating Type 1 diabetes are provided, the methods comprising administering a therapeutic compound or polypeptides as provided herein to the subject to treat the Type 1 diabetes.

[0052] In some embodiments, methods of treating a transplant subject are provided, the methods comprising administering a therapeutically effective amount of a therapeutic compound or polypeptides as provided herein to the subject, thereby treating a transplant (recipient) subject.

[0053] In some embodiments, methods of treating graft versus host disease (GVHD) in a subject having a transplanted a donor tissue are provided, the methods comprising administering a therapeutically effective amount of a therapeutic compound or polypeptides as provided herein to the subject.

[0054] In some embodiments, methods of treating a subject having, or at risk, or elevated risk, for having, an autoimmune disorder are provided, the methods comprising administering a therapeutically effective amount of a therapeutic compound or polypeptides as provided herein, thereby treating the subject.

[0055] In some embodiments, the compound has the formula from N-terminus to C-terminus: A1-Linker A-A2-Linker B-A3 or A3-Linker A-A2-Linker B-A1, wherein, A1 and A3, are each, independently, an effector binding/modulating moiety, e.g., an ICIM binding/modulating moiety, an IIC binding/modulating moiety, ICSM binding/modulating moiety, or an SM binding/modulating moiety; or a specific targeting moiety, wherein A2 comprises an Fc region or is absent; and Linker A and Linker B, are linkers, but do not have to be the same.

### BRIEF DESCRIPTION OF THE DRAWINGS

[0056] FIG. 1 depicts non-limiting embodiments of the therapeutic compounds provided herein.

[0057] FIG. 2 depicts a non-limiting illustration of how a therapeutic compound provided herein could function.

[0058] FIG. 3 depicts a non-limiting illustration of the therapeutic compounds provided herein.

[0059] FIG. 3A depicts a non-limiting illustration of the therapeutic compounds provided herein.

[0060] FIG. 4 depicts a non-limiting illustration of the therapeutic compounds provided herein.

[0061] FIG. 5 depicts a non-limiting illustration of the therapeutic compounds provided herein.

[0062] FIG. 6 depicts a non-limiting illustration of the therapeutic compounds provided herein.

[0063] FIG. 7 depicts a non-limiting illustration of the therapeutic compounds provided herein.

[0064] FIG. 8 depicts a non-limiting illustration of the therapeutic compounds provided herein.

[0065] FIG. 9 depicts a non-limiting illustration of the therapeutic compounds provided herein.

[0066] FIG. 10 depicts a non-limiting illustration of the therapeutic compounds provided herein.

[0067] FIG. 11 depicts a non-limiting illustration of the therapeutic compounds provided herein.

[0068] FIG. 12 depicts a non-limiting illustration of the therapeutic compounds provided herein.

[0069] FIG. 13 depicts a non-limiting illustration of the therapeutic compounds provided herein.

[0070] FIG. 14 depicts a non-limiting illustration of the therapeutic compounds provided herein.

[0071] FIG. 15 depicts a non-limiting illustration of the therapeutic compounds provided herein.

[0072] FIG. 16 depicts a non-limiting illustration of the therapeutic compounds provided herein.

[0073] FIG. 17 depicts a non-limiting illustration of the therapeutic compounds provided herein.

[0074] FIG. 18 depicts a non-limiting illustration of the therapeutic compounds provided herein.

[0075] FIG. 19 depicts a non-limiting illustration of the therapeutic compounds provided herein.

### DETAILED DESCRIPTION

[0076] This application incorporates by reference each of the following in its entirety: U.S. application Ser. No. 15/922,592 filed Mar. 15, 2018 and PCT Application No. PCT/US2018/022675, filed Mar. 15, 2018. This application also incorporate by reference, each of the following in their entirety: U.S. Provisional Application No. 62/721,644, filed Aug. 23, 2018, U.S. provisional Application No. 62/675,972 filed May 24, 2018, U.S. provisional Application No. 62/595,357 filed Dec. 6, 2017, U.S. Provisional Application No. 62/595,348, filed Dec. 6, 2017, U.S. Non-Provisional application Ser. No. 16/109,875, filed Aug. 23, 2018, U.S. Non-Provisional application Ser. No. 16/109,897, filed Aug. 23, 2018, U.S. Non-Provisional application Ser. No. 15/988,311, filed May 24, 2018, PCT Application No. PCT/US2018/034334, filed May 24, 2018, and, PCT/US2018/062780, filed Nov. 28, 2018.

[0077] As used herein and unless otherwise indicated, the term “about” is intended to mean±5% of the value it modifies. Thus, about 100 means 95 to 105.

[0078] As used herein and in the appended claims, the singular forms “a”, “an” and “the” include plural reference unless the context clearly dictates otherwise.

[0079] As used herein, the term “about” means that the numerical value is approximate and small variations would not significantly affect the practice of the disclosed embodiments. Where a numerical limitation is used, unless indicated otherwise by the context, “about” means the numerical value can vary by ±10% and remain within the scope of the disclosed embodiments.

[0080] As used herein, the term “animal” includes, but is not limited to, humans and non-human vertebrates such as wild, domestic, and farm animals.

[0081] As used herein, the term “contacting” means bringing together of two elements in an in vitro system or an in vivo system. For example, “contacting” a therapeutic compound with an individual or patient or cell includes the administration of the compound to an individual or patient, such as a human, as well as, for example, introducing a compound into a sample containing a cellular or purified preparation containing target.

[0082] As used herein, the terms “comprising” (and any form of comprising, such as “comprise”, “comprises”, and “comprised”), “having” (and any form of having, such as “have” and “has”), “including” (and any form of including, such as “includes” and “include”), or “containing” (and any form of containing, such as “contains” and “contain”), are inclusive or open-ended and do not exclude additional, unrecited elements or method steps. Any composition or method that recites the term “comprising” should also be understood to also describe such compositions as consisting, consisting of, or consisting essentially of the recited components or elements.

[0083] As used herein, the term “fused” or “linked” when used in reference to a protein having different domains or heterologous sequences means that the protein domains are part of the same peptide chain that are connected to one another with either peptide bonds or other covalent bonding. The domains or section can be linked or fused directly to one another or another domain or peptide sequence can be between the two domains or sequences and such sequences would still be considered to be fused or linked to one another. In some embodiments, the various domains or proteins provided for herein are linked or fused directly to one another or a linker sequences, such as the glycine/serine sequences described herein link the two domains together.

[0084] As used herein, the term “individual,” “subject,” or “patient,” used interchangeably, means any animal, including mammals, such as mice, rats, other rodents, rabbits, dogs, cats, swine, cattle, sheep, horses, or primates, such as humans.

[0085] As used herein, the term “inhibit” refers to a result, symptom, or activity being reduced as compared to the activity or result in the absence of the compound that is inhibiting the result, symptom, or activity. In some embodiments, the result, symptom, or activity, is inhibited by about, or, at least, 10%, 20%, 30%, 40%, 50%, 60%, 70%, 80%, 90%, 95%, or 99%. An result, symptom, or activity can also be inhibited if it is completely elimination or extinguished.

[0086] As used herein, the phrase “in need thereof” means that the subject has been identified as having a need for the particular method or treatment. In some embodiments, the identification can be by any means of diagnosis. In any of the methods and treatments described herein, the subject can be in need thereof. In some embodiments, the subject is in an environment or will be traveling to an environment in which a particular disease, disorder, or condition is prevalent.

[0087] As used herein, the phrase “integer from X to Y” means any integer that includes the endpoints. For example, the phrase “integer from X to Y” means 1, 2, 3, 4, or 5.

[0088] As used herein, the term “mammal” means a rodent (i.e., a mouse, a rat, or a guinea pig), a monkey, a cat, a dog, a cow, a horse, a pig, or a human. In some embodiments, the mammal is a human.

[0089] In some embodiments, therapeutic compounds are provided herein. In some embodiments, the therapeutic compound is a protein or a polypeptide, that has multiple chains that interact with one another. The polypeptides can interact with one another through non-covalent interactions or covalent interactions, such as through disulfide bonds or other covalent bonds. Therefore, if an embodiment refers to a therapeutic compound it can also be said to refer to a protein or polypeptide as provided for herein and vice versa as the context dictates.

[0090] As used herein, the phrase “ophthalmically acceptable” means having no persistent detrimental effect on the treated eye or the functioning thereof, or on the general health of the subject being treated. However, it will be recognized that transient effects such as minor irritation or a “stinging” sensation are common with topical ophthalmic administration of drugs and the existence of such transient effects is not inconsistent with the composition, formulation, or ingredient (e.g., excipient) in question being “ophthalmically acceptable” as herein defined. In some embodiments, the pharmaceutical compositions can be ophthalmically acceptable or suitable for ophthalmic administration.

[0091] “Specific binding” or “specifically binds to” or is “specific for” a particular antigen, target, or an epitope means binding that is measurably different from a non-specific interaction. Specific binding can be measured, for example, by determining binding of a molecule compared to binding of a control molecule, which generally is a molecule of similar structure that does not have binding activity. For example, specific binding can be determined by competition with a control molecule that is similar to the target.

[0092] Specific binding for a particular antigen, target, or an epitope can be exhibited, for example, by an antibody having a K_{D} for an antigen or epitope of at least about 10^{-4M}, at least about 10^{-5M}, at least about 10^{-6 M}, at least about 10^{-7M}, at least about 10^{-8M}, at least about 10^{-9M}, alternatively at least about 10^{-10 M}, at least about 10^{-11M} at least about 10^{-12M}, or greater, where K_{D} refers to a dissociation rate of a particular antibody-target interaction. Typically, an antibody that specifically binds an antigen or target will have a K_{D} that is, or at least, 2-, 4-, 5-, 10-, 20-, 50-, 100-, 500-, 1000-, 5,000-, 10,000-, or more times greater for a control molecule relative to the antigen or epitope.

[0093] In some embodiments, specific binding for a particular antigen, target, or an epitope can be exhibited, for example, by an antibody having a K_{A} or Kₐ for a target, antigen, or epitope of at least 2-, 4-, 5-, 20-, 50-, 100-, 500-, 1000-, 5,000-, 10,000- or more times greater for the target, antigen, or epitope relative to a control, where K_{A} or Kₐ refers to an association rate of a particular antibody-antigen interaction.

[0094] As provided herein, the therapeutic compounds and compositions can be used in methods of treatment as provided herein. As used herein, the terms “treat,” “treated,” or “treating” mean both therapeutic treatment and prophylactic measures wherein the object is to slow down (lessen) an undesired physiological condition, disorder or disease, or obtain beneficial or desired clinical results. For purposes of these embodiments, beneficial or desired clinical results include, but are not limited to, alleviation of symptoms; diminishment of extent of condition, disorder or disease; stabilized (i.e., not worsening) state of condition, disorder or disease; delay in onset or slowing of condition, disorder or disease progression; amelioration of the condition, disorder or disease state or remission (whether partial or total), whether detectable or undetectable; an amelioration of at least one measurable physical parameter, not necessarily discernible by the patient; or enhancement or improvement of condition, disorder or disease. Treatment includes eliciting a clinically significant response without excessive levels of side effects. Treatment also includes prolonging survival as compared to expected survival if not receiving treatment.

[0095] Provided herein are therapeutic compounds, e.g., therapeutic protein molecules, e.g., fusion proteins, including a targeting moiety and an effector binding/modulating moiety, typically as separate domains. Also provided are methods of using and making the therapeutic compounds. The targeting moiety serves to localize the therapeutic compound, and thus the effector binding/modulating moiety, to a site at which immune-privilege is desired. The effector binding/modulating moiety comprises one or more of: (a) an immune cell inhibitory molecule binding/modulating moiety (an ICIM binding/modulating moiety); (b) an immunosuppressive immune cell binding/modulating moiety (an IIC binding/modulating moiety); (c) a soluble molecule binding/modulating moiety (a SM binding/modulating moiety); or (d) a molecule that blocks or inhibits immune cell stimulatory molecule binding/modulating moiety (referred to herein as an ICSM binding/modulating moiety). In some embodiments, the ICSM inhibits immune activation by, for example, blocking the interaction between a costimulatory molecule and its counterstructure. In some embodiments, a therapeutic compound comprises: (a) and (b); (a) and (c); (a) and (d); (b) and (c); (b) and (d); (c) and (d); or (a), (b), (c), and (d).

[0096] The present disclosure provides, for example, molecules that can act as PD-1 agonists. In some embodiments, the agonist is an antibody that binds to PD-1. Without being bound to any particular theory, agonism of PD-1 inhibits T cell activation/signaling and can be accomplished by different mechanisms. For example cross-linking can lead to agonism, bead-bound, functional PD-1 agonists have been described (Akkaya. Ph.D. Thesis: Modulation of the PD-1 pathway by inhibitory antibody superagonists. Christ Church College, Oxford, UK, 2012), which is hereby incorporated by reference. Crosslinking of PD-1 with two mAbs that bind non-overlapping epitopes induces PD-1 signaling (Davis, US 2011/0171220), which is hereby incorporated by reference. Another example is illustrated through the use of a goat anti-PD-1 antiserum (e.g. AF1086, R&D Systems) which is hereby incorporated by reference, which acts as an agonist when soluble (Said et al., 2010, Nat Med) which is hereby incorporated by reference. Non-limiting examples of PD-1 agonists that can be used in the present embodiments include, but are not limited to, UCB clone 19 or clone 10, PD1AB-1, PD1AB-2, PD1AB-3, PD1AB-4 and PD1AB-5, PD1AB-6 (Anaptys/Celgene), PD1-17, PD1-28, PD1-33 and PD1-35 (Collins et al, US 2008/0311117 A1), antibodies against PD-1 and uses therefor, which is hereby incorporated by reference, or can be a bispecific, monovalent anti-PD-1/anti-CD3 (Ono), and the like. In some embodiments, the PD-1 agonist antibodies can be antibodies that block binding of PD-L1 to PD-1. In some embodiments, the PD-1 agonist antibodies can be antibodies that do not block binding of PD-L1 to PD-1. In some embodiments, the antibody does not act as an antagonist of PD-1.

[0097] PD-1 agonism can be measured by any method, such as the methods described in the examples. For example, cells can be constructed that express, including stably express, constructs that include a human PD-1 polypeptide fused to a beta-galactosidase “Enzyme donor” and 2) a SHP-2 polypeptide fused to a beta-galactosidase “Enzyme acceptor.” Without being bound by any theory, when PD-1 is engaged, SHP-2 is recruited to PD-1. The enzyme acceptor and enzyme donor form a fully active beta-galactosidase enzyme that can be assayed. Although, the assay does not directly show PD-1 agonism, but shows activation of PD-1 signaling. PD-1 agonism can also be measured by measuring inhibition of T cell activation because, without being bound to any theory, PD-1 agonism inhibits anti-CD3-induced T cell activation. For example, PD-1 agonism can be measured by preactivating T cells with PHA (for human T cells) or ConA (for mouse T cells) so that they express PD-1. The cells can then be reactivated with anti-CD3 in the presence of anti-PD-1 (or PD-L1) for the PD-1 agonism assay. T cells that receive a PD-1 agonist signal in the presence of anti-CD3 will show decreased activation, relative to anti-CD3 stimulation alone. Activation can be readout by proliferation or cytokine production (IL-2, IFNg, IL-17) or other markers, such as CD69 activation marker. Thus, PD-1 agonism can be measured by either cytokine production or cell proliferation. Other methods can also be used to measure PD-1 agonism.

[0098] PD-1 is Ig superfamily member expressed on activated T cells and other immune cells. The natural ligands for PD-1 appear to be PD-L1 and PD-L2. Without being bound to any particular theory, when PD-L1 or PD-L2 bind to PD-1 on an activated T cell, an inhibitory signaling cascade is initiated, resulting in attenuation of the activated T effector cell function. Thus, blocking the interaction between PD-1 on a T cell, and PD-L1/2 on another cell (e.g., tumor cell) with a PD-1 antagonist is known as checkpoint inhibition, and releases the T cells from inhibition. In contrast, PD-1 agonist antibodies can bind to PD-1 and send an inhibitory signal and attenuate the function of a T cell. Thus, PD-1 agonist antibodies can be incorporated into various embodiments described herein as an effector molecule binding/modulating moiety, which can accomplish localized tissue-specific immunomodulation when paired with a targeting moiety.

[0099] The effector molecule binding/modulating moiety can provide an immunosuppressive signal or environment in a variety of ways. In some embodiments, the effector binding/modulating moiety comprises an ICIM binding/modulating moiety that directly binds and (under the appropriate conditions as described herein) activates an inhibitory receptor expressed by immune cells responsible for driving disease pathology. In another embodiment, the effector binding/modulating moiety comprises and IIC binding/modulating moiety and binds and accumulates immunosuppressive immune cells. In some embodiments, the accumulated immune suppressive cells promote immune privilege. In another embodiment, the effector binding/modulating moiety comprises an SM binding/modulating moiety which manipulates the surrounding microenvironment to make it less permissible for the function of immune cells, e.g., immune cells driving disease pathology. In some embodiments, the SM binding/modulating moiety depletes an entity that promotes immune attack or activation. In some embodiments, the effector binding/modulating moiety comprises an ICSM binding/modulating moiety that binds a member of a pair of stimulatory molecules, e.g., costimulatory molecules, and inhibits the interaction between the costimulatory molecule and the costimulatory molecule counterstructure, such as, but not limited to, OX40 or CD30 or CD40 and OX40L, or CD30L or CD40L, and inhibits the immune stimulation of a cell, such as, but not limited to, a T cell, B cell, NK cell, or other immune cell comprising a member of the pair.

[0100] The targeting moiety and effector binding/modulating moiety are physically tethered, covalently or non-covalently, directly or through a linker entity, to one another, e.g., as a member of the same protein molecule in a therapeutic protein molecule. In some embodiments, the targeting and effector moieties are provided in a therapeutic protein molecule, e.g., a fusion protein, typically as separate domains. In some embodiments, the targeting moiety, the effector binding/modulating moiety, or both each comprises a single domain antibody molecule, e.g., a camelid antibody VHH molecule or human soluble VH domain. It may also contain a single-chain fragment variable (scFv) or a Fab domain. In some embodiments, the therapeutic protein molecule, or a nucleic acid, e.g., an mRNA or DNA, encoding the therapeutic protein molecule, can be administered to a subject. In some embodiments, the targeting and effector molecule binding/modulating moieties are linked to a third entity, e.g., a carrier, e.g., a polymeric carrier, a dendrimer, or a particle, e.g., a nanoparticle. The therapeutic compounds can be used to down regulate an immune response at or in a tissue at a selected target or site while having no or substantially less immunosuppressive function systemically. The target or site can comprise donor tissue or autologous tissue.

[0101] Provided herein are methods of providing site-specific immune privilege for a transplanted donor tissue, e.g., an allograft tissue, e.g., a tissue described herein, e.g., an allograft liver, an allograft kidney, an allograft heart, an allograft pancreas, an allograft thymus or thymic tissue, an allograft skin, or an allograft lung, with therapeutic compounds disclosed herein. In embodiments the treatment minimizes rejection of, minimizes immune effector cell mediated damage to, prolongs acceptance of, or prolongs the functional life of, donor transplant tissue.

[0102] Also provided herein are methods of inhibiting GVHD by minimizing the ability of donor immune cells, e.g., donor T cells, to mediate immune attack of recipient tissue, with therapeutic compounds disclosed herein.

[0103] Also provided herein are methods of treating, e.g., therapeutically treating or prophylactically treating (or preventing), an autoimmune disorder or response in a subject by administration of a therapeutic compound disclosed herein, e.g., to provide site or tissue specific modulation of the immune system. In some embodiments, the method provides tolerance to, minimization of the rejection of, minimization of immune effector cell mediated damage to, or prolonging a function of, subject tissue. In some embodiments, the therapeutic compound includes a targeting moiety that targets, e.g., specifically targets, the tissue under, or at risk for, autoimmune attack. Non-limiting exemplary tissues include, but are not limited to, the pancreas, myelin, salivary glands, synoviocytes, and myocytes.

[0104] As used herein, the terms “treat,” “treated,” or “treating” in regards to therapeutic treatment wherein the object is to slow down (lessen) an undesired physiological condition, disorder or disease, or obtain beneficial or desired clinical results. For example, beneficial or desired clinical results include, but are not limited to, alleviation of symptoms; diminishment of extent of condition, disorder or disease; stabilized (i.e., not worsening) state of condition, disorder or disease; delay in onset or slowing of condition, disorder or disease progression; amelioration of the condition, disorder or disease state or remission (whether partial or total), whether detectable or undetectable; an amelioration of at least one measurable physical parameter, not necessarily discernible by the patient; or enhancement or improvement of condition, disorder or disease. Treatment includes eliciting a clinically significant response without excessive levels of side effects. Treatment also includes prolonging survival as compared to expected survival if not receiving treatment. Thus, “treatment of an autoimmune disease/disorder” means an activity that alleviates or ameliorates any of the primary phenomena or secondary symptoms associated with the autoimmune disease/disorder or other condition described herein. The various disease or conditions are provided herein. The therapeutic treatment can also be administered prophylactically to preventing or reduce the disease or condition before the onset.

[0105] In some embodiments, administration of the therapeutic compound begins after the disorder is apparent. In some embodiments, administration of the therapeutic compound, begins prior to onset, or full onset, of the disorder. In some embodiments, administration of the therapeutic compound, begins prior to onset, or full onset, of the disorder, e.g., in a subject having the disorder, a high-risk subject, a subject having a biomarker for risk or presence of the disorder, a subject having a family history of the disorder, or other indicator of risk of, or asymptomatic presence of, the disorder. For example, in some embodiments, a subject having islet cell damage but which is not yet diabetic, is treated.

[0106] While not wishing to be bound by theory, it is believed that the targeting moiety functions to bind and accumulate the therapeutic to a target selectively expressed at the anatomical site where immune privilege is desired. In some embodiments, e.g., in the context of donor tissue transplantation, the target moiety binds to a target, e.g., an allelic product, present in the donor tissue but not the recipient. For treatment of autoimmune disorders, the targeting moiety binds a target preferentially expressed at the anatomical site where immune privilege is desired, e.g., in the pancreas. For treatment of GVHD, the targeting moiety targets the host tissue, and protects the host against attack from transplanted immune effector cells derived from transplanted tissue.

[0107] Again, while not wishing to be bound by theory, it is believed that the effector binding/modulating moiety serves to deliver an immunosuppressive signal or otherwise create an immune privileged environment.

[0108] Unless otherwise defined, all technical and scientific terms used herein have the same meaning as commonly understood by one of ordinary skill in the art to which these embodiments belong. Although methods and materials similar or equivalent to those described herein can be used in the practice or testing of the present embodiments, suitable methods and materials are described below. All publications, patent applications, patents, and other references mentioned herein are incorporated by reference in their entirety. In addition, the materials, methods, and examples are illustrative only and not intended to be limiting. Headings, sub-headings or numbered or lettered elements, e.g., (a), (b), (i) etc, are presented merely for ease of reading. The use of headings or numbered or lettered elements in this document does not require the steps or elements be performed in alphabetical order or that the steps or elements are necessarily discrete from one another. Other features, objects, and advantages of the embodiments will be apparent from the description and drawings, and from the claims.

### Additional Definitions

[0109] Unless defined otherwise, all technical and scientific terms used herein have the same meaning as commonly understood by one of ordinary skill in the art to which the embodiments pertains. In describing and claiming the present embodiments, the following terminology and terminology otherwise referenced throughout the present application will be used according to how it is defined, where a definition is provided.

[0110] It is also to be understood that the terminology used herein is for the purpose of describing particular embodiments only, and is not intended to be limiting.

[0111] Antibody molecule, as that term is used herein, refers to a polypeptide, e.g., an immunoglobulin chain or fragment thereof, comprising at least one functional immunoglobulin variable domain sequence. An antibody molecule encompasses antibodies (e.g., full-length antibodies) and antibody fragments. In some embodiments, an antibody molecule comprises an antigen binding or functional fragment of a full-length antibody, or a full-length immunoglobulin chain. For example, a full-length antibody is an immunoglobulin (Ig) molecule (e.g., an IgG antibody) that is naturally occurring or formed by normal immunoglobulin gene fragment recombinatorial processes. In embodiments, an antibody molecule refers to an immunologically active, antigen binding portion of an immunoglobulin molecule, such as an antibody fragment. An antibody fragment, e.g., functional fragment, comprises a portion of an antibody, e.g., Fab, Fab′, F(ab′)2, F(ab)2, variable fragment (Fv), domain antibody (dAb), or single chain variable fragment (scFv). A functional antibody fragment binds to the same antigen as that recognized by the intact (e.g., full-length) antibody. The terms “antibody fragment” or “functional fragment” also include isolated fragments consisting of the variable regions, such as the “Fv” fragments consisting of the variable regions of the heavy and light chains or recombinant single chain polypeptide molecules in which light and heavy variable regions are connected by a peptide linker (“scFv proteins”). In some embodiments, an antibody fragment does not include portions of antibodies without antigen binding activity, such as Fc fragments or single amino acid residues. Exemplary antibody molecules include full-length antibodies and antibody fragments, e.g., dAb (domain antibody), single chain, Fab, Fab′, and F(ab′)2 fragments, and single chain variable fragments (scFvs).

[0112] The term “antibody molecule” also encompasses whole or antigen binding fragments of domain, or single domain, antibodies, which can also be referred to as “sdAb” or “VHH.” Domain antibodies comprise either VH or VL that can act as stand-alone, antibody fragments. Additionally, domain antibodies include heavy-chain-only antibodies (HCAbs). Domain antibodies also include a CH2 domain of an IgG as the base scaffold into which CDR loops are grafted. It can also be generally defined as a polypeptide or protein comprising an amino acid sequence that is comprised of four framework regions interrupted by three complementarity determining regions. This is represented as FR1-CDR1-FR2-CDR2-FR3-CDR3-FR4. sdAbs can be produced in camelids such as llamas, but can also be synthetically generated using techniques that are well known in the art. The numbering of the amino acid residues of a sdAb or polypeptide is according to the general numbering for VH domains given by Kabat et al. (“Sequence of proteins of immunological interest,” US Public Health Services, NIH Bethesda, Md., Publication No. 91, which is hereby incorporated by reference). According to this numbering, FR1 of a sdAb comprises the amino acid residues at positions 1-30, CDR1 of a sdAb comprises the amino acid residues at positions 31-36, FR2 of a sdAb comprises the amino acids at positions 36-49, CDR2 of a sdAb comprises the amino acid residues at positions 50-65, FR3 of a sdAb comprises the amino acid residues at positions 66-94, CDR3 of a sdAb comprises the amino acid residues at positions 95-102, and FR4 of a sdAb comprises the amino acid residues at positions 103-113. Domain antibodies are also described in WO2004041862 and WO2016065323, each of which is hereby incorporated by reference. The domain antibodies can be a targeting moiety as described herein.

[0113] Antibody molecules can be monospecific (e.g., monovalent or bivalent), bispecific (e.g., bivalent, trivalent, tetravalent, pentavalent, or hexavalent), trispecific (e.g., trivalent, tetravalent, pentavalent, or hexavalent), or with higher orders of specificity (e.g., tetraspecific) and/or higher orders of valency beyond hexavalency. An antibody molecule can comprise a functional fragment of a light chain variable region and a functional fragment of a heavy chain variable region, or heavy and light chains may be fused together into a single polypeptide.

[0114] Examples of formats for multispecific therapeutic compounds, e.g., bispecific antibody molecules are shown in the following non-limiting examples. Although illustrated with antibody molecules, they can be used as platforms for therapeutic molecules that include other non-antibody moieties as specific binding or effector moieties. In some embodiments, these non-limiting examples are based upon either a symmetrical or asymmetrical Fc formats.

[0115] For example, the figures illustrate non-limiting and varied symmetric homodimer approach. In some embodiments, the dimerization interface centers around human IgG1 CH2-CH3 domains, which dimerize via a contact interface spanning both CH2/CH2 and CH3/CH3. The resulting bispecific antibodies shown have a total valence comprised of four binding units with two identical binding units at the N-terminus on each side of the dimer and two identical units at the C-terminus on each side of the dimer. In each case the binding units at the N-terminus of the homodimer are different from those at the C-terminus of the homodimer. Using this type of bivalency for both an inhibitory T cell receptor at either terminus of the molecule and bivalency for a tissue tethering antigen can be achieved at either end of the molecule.

[0116] For example, in FIG. 3, a non-limiting embodiment is illustrated. The N-terminus of the homodimer contains two identical Fab domains comprised of two identical light chains, which are separate polypeptides, interfaced with the n-terminal VH-CH1 domains of each heavy chain via the VH/VL interaction and Ckappa or Clambda interaction with CH1. The native disulphide bond between the Ckappa or Clambda with CH1 is present providing a covalent anchor between the light and heavy chains. At the C-terminus of this design are two identical scFv units where by (in this example) the C-terminus of the CH3 domain of the Fc, is followed by a flexible, hydrophilic linker typically comprised of (but not limited to) serine, glycine, alanine, and/or threonine residues, which is followed by the VH domain of each scFv unit, which is followed by a glycine/serine rich linker, followed by a VL domain. These tandem VH and VL domains associate to form a single chain fragment variable (scFv) appended at the C-terminus of the Fc. Two such units exist at the C-terminus of this molecule owing to the homodimeric nature centered at the Fc. The domain order of scFvs may be configured to be from N- to C-terminus either VH-Linker-VL or VL-Linker-VH.

[0117] A non-limiting example of a molecule that has different binding regions on the different ends is where, one end is a PD-1 agonist and the antibody that provides target specificity is an anti-MAdCAM-1 antibody. This can be illustrated as shown, for example, in FIG. 3A, which illustrates the molecules in different orientations.

[0118] In some embodiments, the MAdCAM antibody is a blocking or non-blocking antibody as described elsewhere herein. Without being bound to any theory, MAdCAM has been shown to interact with the headpiece of the integrin α4β7 expressed on lymphocytes via multiple residues within its two Ig superfamily I-set domains and the atomic level structural basis for that interaction has been described (Viney J L et al. (1996). J Immunol. 157, 2488-2497; Yu Y et al (2013). J Biol Chem. 288, 6284-6294; Yu Y et al (2012). J Cell Biol. 196, 131-146, each of which is hereby incorporated by reference in its entirety). It has been shown in great structural, mechanistic and functional detail in both the human (Chen J et al (2003). Nat Struct Biol. 10, 995-1001; de Chateau M et al (2001). Biochemistry. 40, 13972-13979) and mouse (Day E S et al (2002). Cell Commun Adhes. 9, 205-219; Hoshino H et al (2011). J Histochem Cytochem. 59, 572-583) molecular systems that any interaction of MAdCAM with α4β7 is dependent on three dication binding sites present in the integrin β7 subunit I-like domain and that these metal binding sites can coordinate with Ca2+, Mn2+, and Mg2+. Using cell adhesion assays, flow cytometry, and/or flow chamber assays in the presence of high levels of Ca2+ with or without Mg2+ or Mn2+, the MAdCAM/α4β7 interaction is shown to be of a lower functional affinity and permits rolling adhesion of lymphocytes, whereas in low Ca2+ but higher Mg2+ or Mn2+ which activates the integrin, the MAdCAM/α4β7 interaction is of a higher functional affinity and mediates firm lymphocyte adhesion (Chen J et al (2003). Nat Struct Biol. 10, 995-1001). A number of groups have shown that various cell:cell, cell:membrane prep, and/or cell:protein based adhesion/interaction assays can be utilized, with FACS, cell flow chamber based counts, or IHC based read-outs to monitor the impact of anti-MAdCAM or anti-α4β7 antibodies upon the interaction of MAdCAM with α4β7, allowing one to identify blocking or non-blocking antibodies (Nakache M et al (1989). Nature. 337, 179-181; Streeter P R et al (1988). Nature. 331. 41-46; Yang Y et al (1995). Scand J Immunol. 42. 235-247; Leung E et al (2004). Immunol Cell Biol. 82. 400-409; Pullen N et al (2009). B J Pharmacol. 157. 281-293; Soler D et al (2009). J Pharmacol Exp Ther. 330. 864-875; Qi J et al (2012). J Biol Chem. 287. 15749-15759).

[0119] This has been exemplified in the mouse system setting with the identification of anti-mouse MAdCAM antibodies such as MECA89 (non-blocking) and MECA367 (blocking) (Nakache M et al (1989). Nature. 337, 179-181; Streeter P R et al (1988). Nature. 331. 41-46; Yang Y et al (1995). Scand J Immunol. 42. 235-247). In a human system, antibodies have been identified that block the interaction of human MAdCAM with human α4β7 such as anti-human MAdCAM PF-00547659 (Pullen N et al (2009). B J Pharmacol. 157. 281-293), and anti-human α4β7 vedolizumab (Soler D et al (2009). J Pharmacol Exp Ther. 330. 864-875), as well as antibodies that do not block the interaction such as anti-human MAdCAM clone 17F5 (Soler D et al (2009). J Pharmacol Exp Ther. 330. 864-875), and anti-human α4β7 clone J19 (Qi J et al (2012). J Biol Chem. 287. 15749-15759). Thus, the antibody can either be blocking or non-blocking based upon the desired effect. In some embodiments, the antibody is a non-blocking MAdCAM antibody. In some embodiments, the antibody is a blocking MAdCAM antibody. One non-limiting example of demonstrating whether an antibody is blocking or non-blocking can be found in Example 6, but any method can be used. Each of the references described herein are incorporated by reference in its entirety. In some embodiments, the PD-1 agonist is replaced with an IL-2 mutein, such as, but not limited to, the ones described herein.

[0120] In another example, and as depicted in FIG. 4, the N-terminus of the homodimer contains two identical Fab domains comprised of two identical light chains, which are separate polypeptides, interfaced with the N-terminal VH-CH1 domains of each heavy chain via the VH/VL interaction and Ckappa or Clambda interaction with CH1. The native disulphide bond between the Ckappa or Clambda with CH1 is present providing a covalent anchor between the light and heavy chains. At the C-terminus of this design are two identical VH units (though non-antibody moieties could also be substituted here or at any of the four terminal attachment/fusion points) where by (in this example) the C-terminus of the CH3 domain of the Fc, is followed by a flexible, hydrophilic linker typically comprised of (but not limited to) serine, glycine, alanine, and/or threonine residues, which is followed by a soluble independent VH3 germline family based VH domain. Two such units exist at the C-terminus of this molecule owing to the homodimeric nature centered at the Fc.

[0121] In another non-limiting example, as depicted in FIG. 5, the N-terminus of the homodimer contains two identical Fab domains comprised of two identical light chains, which, unlike FIG. 3 and FIG. 4, are physically conjoined with the heavy chain at the N-terminus via a linker between the C-terminus of Ckappa or Clambda and the N-terminus of the VH. The linker may be 36-80 amino acids in length and comprised of serine, glycine, alanine and threonine residues. The physically conjoined N-terminal light chains interface with the N-terminal VH-CH1 domains of each heavy chain via the VH/VL interaction and Ckappa or Clambda interaction with CH1. The native disulphide bond between the Ckappa or Clambda with CH1 is present providing additional stability between the light and heavy chains. At the C-terminus of this design are two identical Fab units where by (in this example) the C-terminus of the CH3 domain of the Fc, is followed by a flexible, hydrophilic linker typically comprised of (but not limited to) serine, glycine, alanine, and/or threonine residues, which is followed by a CH1 domain, followed by a VH domain at the C-terminus. The light chain that is designed to pair with the C-terminal CH1/VH domains is expressed as a separate polypeptide, unlike the N-terminal light chain which is conjoined to the N-terminal VH/CH1 domains as described. The C-terminal light chains form an interface at between VH/VL and Ckappa or Clambda with CH1. The native disulphide anchors this light chain to the heavy chain. Again, any of the antibody moieties at any of the four attachment/fusion points can be substituted with a non-antibody moiety, e.g., an effector binding/modulating moiety that does not comprise an antibody molecule.

[0122] The bispecific antibodies can also be asymmetric as shown in the following non-limiting examples. Non-limiting example are also depicted in FIG. 6, FIG. 7, and FIG. 8, which illustrate an asymmetric/heterodimer approach. Again, in any of these formats, any of the antibody moieties at any of the four attachment/fusion points can be substituted with a non-antibody moiety, e.g., a effector binding/modulating moiety that does not comprise an antibody molecule. In some embodiments, the dimerization interface centers around the human IgG1 CH2-CH3 domains, which dimerize via a contact interface spanning both CH2/CH2 and CH3/CH3. However, in order to achieve heterodimerization instead of homodimerization of each heavy chain, mutations are introduced in each CH3 domain. The heterodimerizing mutations include T366W mutation (Kabat) in one CH3 domain and T366S, L368A, and Y407V (Kabat) mutations in the other CH3 domain. The heterodimerizing interface may be further stabilized with de novo disulphide bonds via mutation of native residues to cysteine residues such as S354 and Y349 on opposite sides of the CH3/CH3 interface. The resulting bispecific antibodies shown have a total valence comprised of four binding units. With this approach, the overall molecule can be designed to have bispecificity at just one terminus and monospecificity at the other terminus (trispecificity overall) or bispecificity at either terminus with an overall molecular specificity of 2 or 4. In the illustrative examples below, the C-terminus comprises two identical binding domains which could, for example, provide bivalent monospecificity for a tissue tethering target. At the N-terminus of all three of the illustrative examples, both binding domains comprise different recognition elements/paratopes and which could achieve recognition of two different epitopes on the same effector moiety target, or could recognize for example a T cell inhibitory receptor and CD3. In some embodiments, the N-terminal binding moieties may be interchanged with other single polypeptide formats such as scFv, single chain Fab, tandem scFv, VH or VHH domain antibody configurations for example. Other types of recognition element may be used also, such as linear or cyclic peptides.

[0123] An example of an asymmetric molecule is depicted in FIG. 6. Referring to FIG. 6, the N-terminus of the molecule is comprised of a first light chain paired with a first heavy chain via VH/VL and Ckappa or Clambda/CH1 interactions and a covalent tether comprised of the native heavy/light chain disulphide bond. On the opposite side of this heterodimeric molecule at the N-terminus is a second light chain and a second heavy chain which are physically conjoined via a linker between the C-terminus of Ckappa or Clambda and the N-terminus of the VH. The linker may be 36-80 amino acids in length and comprised of serine, glycine, alanine and threonine residues. The physically conjoined N-terminal light chains interface with the N-terminal VH-CH1 domains of each heavy chain via the VH/VL interaction and Ckappa or Clambda interaction with CH1. The native disulphide bond between the Ckappa or Clambda with CH1 is present providing additional stability between the light and heavy chains. At the C-terminus of the molecule are two identical soluble VH3 germline family VH domains joined via an N-terminal glycine/serine/alanine/threonine based linker to the C-terminus of the CH3 domain of both heavy chain 1 and heavy chain 2.

[0124] In some embodiments, an asymmetric molecule can be as illustrated as depicted in FIG. 7. For example, the N-terminus of the molecule is comprised of two different VH3 germlined based soluble VH domains linked to the human IgG1 hinge region via a glycine/serine/alanine/threonine based linker. The VH domain connected to the first heavy chain is different to the VH domain connected to the second heavy chain. At the C-terminus of each heavy chain is an additional soluble VH3 germline based VH domain, which is identical on each of the two heavy chains. The heavy chain heterodimerizes via the previously described knobs into holes mutations present at the CH3 interface of the Fc module.

[0125] In some embodiments, an asymmetric molecule can be as illustrated in FIG. 8. This example is similar to the molecule shown in FIG. 7, except both N-terminal Fab units are configured in a way that light chain 1 and light chain 2 are physically conjoined with heavy chain 1 and heavy chain 2 via a linker between the C-terminus of Ckappa or Clambda and the N-terminus of each respective VH. The linker in each case may be 36-80 amino acids in length and comprised of serine, glycine, alanine and threonine residues. The physically conjoined N-terminal light chains interface with the N-terminal VH-CH1 domains of each heavy chain via the VH/VL interaction and Ckappa or Clambda interaction with CH1. The native disulphide bond between the Ckappa or Clambda with CH1 is present providing additional stability between the light and heavy chains.

[0126] Bispecific molecules can also have a mixed format. This is illustrated, for example, in FIG. 9, FIG. 10, and FIG. 11.

[0127] For example, as illustrated in FIG. 9, illustrates a homodimer Fc based approach (see FIGS. 3, 4, and 5), combined with the moiety format selection of FIG. 7, whereby the total molecular valency is four, but specificity is restricted to two specificities. The N-terminus is comprised of two identical soluble VH3 germline based VH domains and the C-terminus is comprised of two identical soluble VH3 germlined based VH domains of different specificity to the N-terminal domains. Therefore, each specificity has a valence of two. Again, in this format, any of the antibody moieties at any of the four attachment/fusion points can be substituted with a non-antibody moiety, e.g., an effector binding/modulating moiety that does not comprise an antibody molecule.

[0128] FIG. 10 illustrates another example. In this example, the molecule is comprised of four VH3 germline based soluble VH domains. The first two domains have the same specificity (for example an inhibitory receptor), the 3rd domain from the N-terminus may have specificity for a tissue antigen and the fourth domain from the N-terminus may have specificity for human serum albumin (HSA), thereby granting the molecule extended half-life in the absence of an Ig Fc domain. Three glycine, serine, alanine and/or threonine rich linkers exists between domains 1 and 2, domains 2 and 3, and domains 3 and 4. This format may be configured with up to tetraspecificity, but monovalent in each case, or to have bispecificity with bivalency in each case. The order of domains can be changed. Again, in this format, any of the antibody moieties can be substituted with a non-antibody moiety, e.g., a effector binding/modulating moiety that does not comprise an antibody molecule.

[0129] FIG. 11 illustrates yet another approach. This example is similar to FIGS. 3 and 4, in that it is Fc homodimer based with two identical Fab units (bivalent monospecificity) at the N-terminus of the molecule. This example differs in that the C-terminus of each heavy chain is appended with a tandem-scFv. Thus, in each case the C-terminus of the CH3 domain of the Fc is linked via a glycine/serine/alanine/threonine based linker to the N-terminus of a first VH domain, which is linked via the C-terminus by a 12-15 amino acid glycine/serine rich linker to the N-terminus of a first VL domain, which linked via a 25-35 amino acid glycine/serine/alanine/threonine based linker at the C-terminus to the N-terminus of a second VH domain, which is linked via the C-terminus with a 12-15 amino acid glycine/serine based linker to the N-terminus of a 2nd VL domain. In this Fc homodimer based molecule there are therefore two identical tandem scFvs at the C-terminus of the molecule offering either tetravalency for a single tissue antigen for example or bivalency to two different molecules. This format could also be adapted with a heterodimer Fc core allowing two different tandem-scFvs at the C-terminus of the Fc allowing for monovalent tetraspecificity at the C-terminus while retaining either bivalent monospecificity at the N-terminus or monovalent bispecificity at the N-terminal via usage of single chain Fab configurations as in FIGS. 5, 6, and 7. This molecule can therefore be configured to have 2, 3, 4, 5, or 6 specificities. The domain order of scFvs within the tandem—scFv units may be configured to be from N- to C-terminus either VH-Linker-VL or VL-Linker-VH. Again, in this format, any of the antibody moieties at any of the four attachment/fusion points can be substituted with a non-antibody moiety, e.g., an effector binding/modulating moiety that does not comprise an antibody molecule.

[0130] Bispecific antibodies can also be constructed to have, for example, shorter systemic PK while having increased tissue penetration. These types of antibodies can be based upon, for example, a human VH3 based domain antibody format. These are illustrated, for example, in FIGS. 12, 13, and 14. FIGS. 12, 13, and 14 each comprised a soluble VH3 germline family based VH domain modules. Each domain is approximately 12.5 kDa allowing for a small overall MW, which, without being bound to any particular theory, should be beneficial for enhanced tissue penetration. In these examples, none of the VH domains recognize any half-life extending targets such as FcRn or HSA. As illustrated in FIG. 12, the molecule is comprised of two VH domains joined with a flexible hydrophilic glycine/serine based linker between the C-terminus of the first domain and N-terminus of the second domain. In this example one domain may recognize a T cell costimulatory receptor and the second may recognize a tissue tethering antigen. As illustrated in FIG. 13, the molecule is comprised of three VH domains with N—C-terminal linkages of hydrophilic glycine/serine based linkers. The molecule may be configured to be trispecific but monovalent for each target. It may be bispecific with bivalency for one target and monovalency for another. As illustrated in FIG. 14, the molecule is comprised of four VH domains with N—C-terminal glycine/serine rich linkers between each domain. This molecule may be configured to be tetraspecific, trispecific, or bispecific with varying antigenic valencies in each case. Again, in this format, any of the antibody moieties at can be substituted with a non-antibody moiety, e.g., a effector binding/modulating moiety that does not comprise an antibody molecule.

[0131] Other embodiments of bispecific antibodies are illustrated in FIGS. 15 and 16. FIGS. 15 and 16 are comprised of the naturally heterodimerizing core of the human IgG CH1/Ckappa interface, including the C-terminal heavy/light disulphide bond which covalently anchors the interaction. This format does not contain an Fc or any moieties for half life extension. As illustrated in FIG. 15, the molecule, at the N-terminus of the Ckappa domain is appended with an scFv fragment consisting of an N-terminal VH domain, linked at its C-terminus to the N-terminus of a VL domain via a 12-15 amino acid glycine/serine based linker, which is linked by its C-terminus to the N-terminus of the Ckappa domain via the native VL-Ckappa elbow sequence. The CH1 domain is appended at the N-terminus with an scFv fragment consisting of an N-terminal VL domain linked at its C-terminus via a 12-15 amino acid glycine/serine linker to the N-terminus of a VH domain, which is linked at its C-terminus to the N-terminus of the CH1 domains via the natural VH-CH1 elbow sequence. As illustrated in FIG. 16, the molecule has the same N-terminal configuration to Example 13. However the C-terminus of the Ckappa and CH1 domains are appended with scFv modules which may be in either the VH-VL or VL-VH configuration and may be either specific for the same antigen or specific for two different antigens. The VH/VL inter-domain linkers may be 12-15 amino acids in length and consisting of glycine/serine residues. The scFv binding sub-units may be swapped for soluble VH domains, or peptide recognition elements, or even tandem-scFv elements. This approach can also be configured to use Vlambda and/or Clambda domains. Again, in this format, any of the antibody moieties at any of the attachment/fusion points can be substituted with a non-antibody moiety, e.g., a effector binding/modulating moiety that does not comprise an antibody molecule.

[0132] FIG. 17 illustrates another embodiment. FIG. 17 represents a tandem scFv format consisting of a first N-terminal VL domain linked at its C-terminus to the N-terminus of a first VH domain with a 12-15 amino acid glycine/serine rich linker, followed at the first VH C-terminus by a 25-30 amino acid glycine/serine/alanine/threonine based linker to the N-terminus of a second VL domain. The second VL domain is linked at the C-terminus to the N-terminus of a 2nd VH domain by a 12-15 amino acid glycine/serine linker. Each scFv recognizes a different target antigen such as a costimulatory T cell molecule and a tissue tethering target. Again, in this format, any of the antibody moieties can be substituted with a non-antibody moiety, e.g., a effector binding/modulating moiety that does not comprise an antibody molecule.

[0133] FIG. 18 illustrates another embodiment. FIG. 18 is a F(ab′)2 scFv fusion. This consists of two identical Fab components joined via two disulphide bonds in the native human IgG1 hinge region C-terminal of the human IgG CH1 domain. The human IgG1 CH2 and CH3 domains are absent. At the C-terminus of heavy chains 1 and 2 are two identical scFv fragments linked via a glycine/serine/alanine/threonine rich linker to the C-terminus of the huIgG1 hinge region. In the configuration shown, the VH is N-terminal in each scFv unit and linked via a 12-15 amino acid glycine/serine rich linker to the N-terminus of a VL domain. An alternative configuration would be N-term-VL-Linker-VH-C-term. In this design, the construct is bispecific with bivalency for reach target. Again, in this format, any of the antibody moieties at any of the four attachment/fusion points can be substituted with a non-antibody moiety, e.g., a effector binding/modulating moiety that does not comprise an antibody molecule.

[0134] CD39 molecule, as that term as used herein, refers to a polypeptide having sufficient CD39 sequence that, as part of a therapeutic compound, it phosphohydrolyzes ATP to AMP. In some embodiments, a CD39 molecule phosphohydrolizes ATP to AMP equivalent to, or at least, 10, 20, 30, 40, 50, 60, 70, 80, 90, or 95% of the rate of a naturally occurring CD39, e.g., the CD39 from which the CD39 molecule was derived. In some embodiments, a CD39 molecule has at least 60, 70, 80, 90, 95, 99, or 100% sequence identity, or substantial sequence identity, with a naturally occurring CD39.

[0135] Any functional isoform can be used (with CD39 or other proteins discussed herein). Exemplary CD39 sequence include Genbank accession #NP_001767.3 or a mature form from the following sequence:

(SEQ ID NO: 1)
MEDTKESNVKTFCSKNILAILGFSSIIAVIALLAVGLTQNKALPENVKY
GIVLDAGSSHTSLYIYKWPAEKENDTGVVHQVEECRVKGPGISKFVQKV
NEIGIYLTDCMERAREVIPRSQHQETPVYLGATAGMRLLRMESEELADR
VLDVVERSLSNYPFDFQGARIITGQEEGAYGWITINYLLGKFSQKTRWF
SIVPYETNNQETFGALDLGGASTQVTFVPQNQTIESPDNALQFRLYGKD
YNVYTHSFLCYGKDQALWQKLAKDIQVASNEILRDPCFHPGYKKVVNVS
DLYKTPCTKRFEMTLPFQQFEIQGIGNYQQCHQSILELFNTSYCPYSQC
AFNGIFLPPLQGDFGAFSAFYFVMKFLNLTSEKVSQEKVTEMMKKFCAQ
PWEEIKTSYAGVKEKYLSEYCFSGTYILSLLLQGYHFTADSWEHIHFIG
KIQGSDAGWTLGYMLNLTNMIPAEQPLSTPLSHSTYVFLMVLFSLVLFT
VAIIGLLIFHKPSYFWKDMV.

[0136] In some embodiments, a CD39 molecule comprises a soluble catalytically active form of CD39 found to circulate in human or murine serum, see, e.g., Metabolism of circulating ADP in the bloodstream is mediated via integrated actions of soluble adenylate kinase-1 and NTPDase1/CD39 activities, Yegutkin et al. FASEB J. 2012 September; 26(9):3875-83. A soluble recombinant CD39 fragment is also described in Inhibition of platelet function by recombinant soluble ecto-ADPase/CD39, Gayle, et al., J Clin Invest. 1998 May 1; 101(9): 1851-1859.

[0137] CD73 molecule, as that term as used herein, refers to a polypeptide having sufficient CD73 sequence that, as part of a therapeutic compound, it dephosphorylates extracellular AMP to adenosine. In some embodiments, a CD73 molecule dephosphorylates extracellular AMP to adenosine equivalent to, or at least, 10, 20, 30, 40, 50, 60, 70, 80, 90, or 95% of the rate of a naturally occurring CD73, e.g., the CD73 from which the CD73 molecule was derived. In some embodiments, a CD73 molecule has at least 60, 70, 80, 90, 95, 99, or 100% sequence identity, or substantial sequence identity, with a naturally occurring CD73. Exemplary CD73 sequences include GenBank AAH65937.1 5′-nucleotidase, ecto (CD73) [Homo sapiens] or a mature form from the following sequence,

(SEQ ID NO: 2)
MCPRAARAPATLLLALGAVLWPAAGAWELTILHTNDVHSRLEQTSEDSS
KCVNASRCMGGVARLFTKVQQIRRAEPNVLLLDAGDQYQGTIWFTVYKG
AEVAHFMNALRYDAMALGNHEEDNGVEGLIEPLLKEAKEPILSANIKAK
GPLASQISGLYLPYKVLPVGDEVVGIVGYTSKETPFLSNPGTNLVFEDE
ITALQPEVDKLKTLNVNKIIALGHSGFEMDKLIAQKVRGVDVVVGGHSN
TFLYTGNPPSKEVPAGKYPFIVTSDDGRKVPVVQAYAFGKYLGYLKIEF
DERGNVISSHGNPILLNSSIPEDPSIKADINKWRIKLDNYSTQELGKTI
VYLDGSSQSCRFRECNMGNLICDAMINNNLRHADETFWNHVSMCILNGG
GIRSPIDERNNGTITWENLAAVLPFGGTFDLVQLKGSTLKKAFEHSVHR
YGQSTGEFLQVGGIHVVYDLSRKPGDRVVKLDVLCTKCRVPSYDPLKMD
EVYKVILPNFLANGGDGFQMIKDELLRHDSGDQDINVVSTYISKMKVIY
PAVEGRIKFSTGSHCHGSFSLIFLSLWAVIFVLYQ.

[0138] In some embodiments, a CD73 molecule comprises a soluble form of CD73 which can be shed from the membrane of endothelial cells by proteolytic cleavage or hydrolysis of the GPI anchor by shear stress see, e.g., reference: Yegutkin G, Bodin P, Burnstock G. Effect of shear stress on the release of soluble ecto-enzymes ATPase and 5′-nucleotidase along with endogenous ATP from vascular endothelial cells. Br J Pharmacol 2000; 129: 921-6. For CD73 function see Colgan et al., Physiological roles for ecto-5′-nucleotidase (CD73), Purinergic Signalling, June 2006, 2:351.

[0139] Cell surface molecule binder, as that term is used herein, refers to a molecule, typically a polypeptide, that binds, e.g., specifically, to a cell surface molecule on a cell, e.g., an immunosuppressive immune cell, e.g., a Treg. In some embodiments, the cell surface binder has sufficient sequence from a naturally occurring ligand of the cell surface molecule, that it can specifically bind the cell surface molecule (a cell surface molecule ligand). In some embodiments, the cell surface binding is an antibody molecule that binds, e.g., specifically binds, the cell surface molecule.

[0140] Donor specific targeting moiety, as that term is used herein, refers to a moiety, e.g., an antibody molecule, that as a component of a therapeutic compound, localizes the therapeutic compound preferentially to an implanted donor tissue, as opposed to tissue of a recipient. As a component of a therapeutic compound, the donor specific targeting moiety provides site-specific immune privilege for a transplant tissue, e.g., an organ, from a donor.

[0141] In some embodiments, a donor specific targeting moiety it binds to the product, e.g., a polypeptide product, of an allele present at a locus, which allele is not present at the locus in the (recipient) subject. In some embodiments, a donor specific targeting moiety binds to an epitope on product, which epitope is not present in the (recipient) subject.

[0142] In some embodiments, a donor specific targeting moiety, as a component of a therapeutic compound, preferentially binds to a donor target or antigen, e.g., has a binding affinity for the donor target that is greater for donor antigen or tissue, e.g., at least 2, 4, 5, 10, 50, 100, 500, 1,000, 5,000, or 10,000 fold greater, than its affinity for subject antigen or tissue. In some embodiments, a donor specific targeting moiety, has a binding affinity for a product of an allele of a locus present in donor tissue (but not present in the subject) at least 2, 4, 5, 10, 50, 100, 500, 1,000, 5,000, or 10,000 fold greater, than its affinity for the product of the allele of the locus present in the subject (which allele is not present in donor tissue). Affinity of a therapeutic compound of which the donor specific moiety is a component, can be measured in a cell suspension, e.g., the affinity for suspended cells having the allele is compared with its affinity for suspended cells not having the allele. In some embodiments, the binding affinity for the donor allele cells is below 10 nM. In some embodiments, the binding affinity for the donor allele cells is below 100 pM, 50 pM, or 10 pM.

[0143] In some embodiments, the specificity for a product of a donor allele is sufficient that when the donor specific targeting moiety is coupled to an immune down regulating effector: i) immune attack of the implanted tissue, e.g., as measured by histological inflammatory response, infiltrating T effector cells, or organ function, in the clinical setting—e.g., creatinine for the kidney, is substantially reduced, e.g., as compared to what would be seen in an otherwise similar implant but lacking the donor specific targeting moiety is coupled to an immune down regulating effector; and/or ii) immune function in the recipient, outside or away from the implanted tissue, is substantially maintained. In some embodiments, one or more of the following is seen: at therapeutic levels of therapeutic compound, peripheral blood lymphocyte counts are not substantially impacted, e.g., the level of T cells is within 25, 50, 75, 85, 90, or 95% of normal, the level of B cells is within 25, 50, 75, 85, 90, or 95% of normal, and/or the level of granuloctyes (PMN cells) is within 25, 50, 75, 85, 90, or 95% of normal, or the level of monocytes is within 25, 50, 75, 85, 90, or 95% of normal; at therapeutic levels of therapeutic compound, the ex vivo proliferative function of peripheral blood mononuclear cells (PBMCs) against non-disease relevant antigens is substantially normal or is within 70, 80, or 90% of normal; at therapeutic levels of therapeutic compound, the incidence or risk of opportunistic infections and cancers associated with immunosuppression is not substantially increased over normal; or at therapeutic levels of therapeutic compound, the incidence or risk of opportunistic infections and cancers associated with immunosuppression is substantially less than would be seen with standard of care, or non-targeted, immunosuppression. In some embodiments, the donor specific targeting moiety comprises an antibody molecule, a target specific binding polypeptide, or a target ligand binding molecule.

[0144] Effector, as that term is used herein, refers to an entity, e.g., a cell or molecule, e.g., a soluble or cell surface molecule, which mediates an immune response.

[0145] Effector ligand binding molecule, as used herein, refers to a polypeptide that has sufficient sequence from a naturally occurring counter ligand of an effector, that it can bind the effector with sufficient specificity that it can serve as an effector binding/modulating molecule. In some embodiments, it binds to effector with at least 10, 20, 30, 40, 50, 60, 70, 80, 90, or 95% of the affinity of the naturally occurring counter ligand. In some embodiments, it has at least 60, 70, 80, 90, 95, 99, or 100% sequence identity, or substantial sequence identity, with a naturally occurring counter ligand for the effector.

[0146] Effector specific binding polypeptide, as used herein, refers to a polypeptide that can bind with sufficient specificity that it can serve as an effector binding/modulating moiety. In some embodiments, a specific binding polypeptide comprises a effector ligand binding molecule.

[0147] Elevated risk, as used herein, refers to the risk of a disorder in a subject, wherein the subject has one or more of a medical history of the disorder or a symptom of the disorder, a biomarker associated with the disorder or a symptom of the disorder, or a family history of the disorder or a symptom of the disorder.

[0148] Functional antibody molecule to an effector or inhibitory immune checkpoint molecule, as that term is used herein, refers to an antibody molecule that when present as the ICIM binding/modulating moiety of a multimerized therapeutic compound, can bind and agonize the effector or inhibitory immune checkpoint molecule. In some embodiments, the anti-effector or inhibitory immune checkpoint molecule antibody molecule, when binding as a monomer (or binding when the therapeutic compound is not multimerized), to the effector or inhibitory immune checkpoint molecule, does not antagonize, substantially antagonize, prevent binding, or prevent substantial binding, of an endogenous counter ligand of the inhibitory immune checkpoint molecule molecule to inhibitory immune checkpoint molecule. In some embodiments, the anti-effector or inhibitory immune checkpoint molecule antibody molecule when binding as a monomer (or binding when the therapeutic compound is not multimerized), to the inhibitory immune checkpoint molecule, does not agonize or substantially agonize, the effector or inhibitory molecule.

[0149] ICIM binding/modulating moiety, as that term is used herein, refers to an effector binding/modulating moiety that, as part of a therapeutic compound, binds and agonizes a cell surface inhibitory molecule, e.g., an inhibitory immune checkpoint molecule, e.g., PD-1, or binds or modulates cell signaling, e.g., binds a FCRL, e.g., FCRL1-6, or binds and antagonizes a molecule that promotes immune function.

[0150] IIC binding/modulating moiety, as that term is used herein, refers to an effector binding/modulating moiety that, as part of a therapeutic compound, binds an immunosuppressive immune cell. In some embodiments, the IIC binding/modulating moiety increases the number or concentration of an immunosuppressive immune cell at the binding site.

[0151] ICSM binding/modulating moiety, as that term is used herein, refers to an effector binding/modulating moiety that antagonizes an immune stimulatory effect of a stimulatory, e.g., costimulatory, binding pair. A stimulatory or costimulatory binding pair, as that term is used herein, comprises two members, 1) a molecule on the surface of an immune cell; and 2) the binding partner for that cell molecule, which may be an additional immune cell, or a non-immune cell. Ordinarily, upon binding of one member to the other, assuming other requirements are met, the member on the immune cell surfaces stimulates the immune cell, e.g., a costimulatory molecule, and an immune response is promoted. In situations where the costimulatory molecule and the costimulatory molecule counterstructure are both expressed on immune cells, bi-directional activation of both cells may occur. In an embodiment an ICSM binding/modulating moiety binds and antagonizes the immune cell expressed member of a binding pair. For example, it binds and antagonizes OX40. In another embodiment, an ICSM binding/modulating moiety binds and antagonizes the member of the binding pair that itself binds the immune cell expressed member, e.g., it binds and antagonizes OX40L. In either case, inhibition of stimulation or costimulation of an immune cell is achieved. In an embodiment the ICSM binding/modulating moiety decreases the number or the activity of an immunostimulating immune cell at the binding site.

[0152] IL-2 mutein molecule, as that term is used herein, refers to an IL-2 variant that binds with high affinity to the CD25 (IL-2R alpha chain) and with low affinity to the other IL-2R signalling components CD122 (IL-2R beta) and CD132 (IL-2R gamma). Such an IL-2 mutein molecule preferentially activates Treg cells. In embodiments, either alone, or as a component of a therapeutic compound, an IL-2 mutein activates Tregs at least 2, 5, 10, or 100 fold more than cytotoxic or effector T cells. Exemplary IL-2 mutein molecules are described in WO2010085495, WO2016/164937, US2014/0286898A1, WO2014153111A2, WO2010/085495, cytotoxic WO2016014428A2, WO2016025385A1, and US20060269515. Muteins disclosed in these references that include additional domains, e.g., an Fc domain, or other domain for extension of half-life can be used in the therapeutic compounds and methods described herein without such additional domains. In another embodiment an IIC binding/modulating moiety comprises an IL-2 mutein, or active fragment thereof, coupled, e.g., fused, to another polypeptide, e.g., a polypeptide that extends in vivo half-life, e.g., an immunoglobulin constant region, or a multimer or dimer thereof, e.g., AMG 592. In an embodiment the therapeutic compound comprises the IL-2 portion of AMG 592. In an embodiment the therapeutic compound comprises the IL-2 portion but not the immunoglobulin portion of AMG 592. In some embodiments, the mutein does not comprise a Fc region. For some IL-2 muteins, the muteins are engineered to contain a Fc region because such region has been shown to increase the half-life of the mutein. In some embodiments, the extended half-life is not necessary for the methods described and embodied herein. In some embodiments, the Fc region that is fused with the IL-2 mutein comprises a N297 mutations, such as, but not limited to, N297A. In some embodiments, the Fc region that is fused with the IL-2 mutein does not comprise a N297 mutation, such as, but not limited to, N297A.

[0153] An “inhibitory immune checkpoint molecule ligand molecule,” as that term is used herein, refers to a polypeptide having sufficient inhibitory immune checkpoint molecule ligand sequence, e.g., in the case of a PD-L1 molecule, sufficient PD-L1 sequence, that when present as an ICIM binding/modulating moiety of a multimerized therapeutic compound, can bind and agonize its cognate inhibitory immune checkpoint molecule, e.g., again in the case of a PD-L1 molecule, PD-1.

[0154] In some embodiments, the inhibitory immune checkpoint molecule ligand molecule, e.g., a PD-L1 molecule, when binding as a monomer (or binding when the therapeutic compound is not multimerized), to its cognate ligand, e.g., PD-1, does not antagonize or substantially antagonize, or prevent binding, or prevent substantial binding, of an endogenous inhibitory immune checkpoint molecule ligand to the inhibitory immune checkpoint molecule. E.g., in the case of a PD-L1 molecule, the PD-L1 molecule does not antagonize binding of endogenous PD-L1 to PD-1.

[0155] In some embodiments, the inhibitory immune checkpoint molecule ligand when binding as a monomer, to its cognate inhibitory immune checkpoint molecule does not agonize or substantially agonize the inhibitory immune checkpoint molecule. By way of example, e.g., a PD-L1 molecule when binding to PD-1, does not agonize or substantially agonize PD-1.

[0156] In some embodiments, an inhibitory immune checkpoint molecule ligand molecule has at least 60, 70, 80, 90, 95, 99, or 100% sequence identity, or substantial sequence identity, with a naturally occurring inhibitory immune checkpoint molecule ligand.

[0157] Exemplary inhibitory immune checkpoint molecule ligand molecules include: a PD-L1 molecule, which binds to inhibitory immune checkpoint molecule PD-1, and in embodiments has at least 60, 70, 80, 90, 95, 99, or 100% sequence identity, or substantial sequence identity, with a naturally occurring PD-L1, e.g., the PD-L1 molecule comprising the sequence of MRIFAVFIFMTYWHLLNAFTVTVPKDLYVVEYGSNMTIECKFPVEKQLDLAALIVYWE MEDKNIIQFVHGEEDLKVQHSSYRQRARLLKDQLSLGNAALQITDVKLQDAGVYRCMI SYGGADYKRITVKVNAPYNKINQRILVVDPVTSEHELTCQAEGYPKAEVIWTSSDHQVL SGKTTTTNSKREEKLFNVTSTLRINTTTNEIFYCTFRRLDPEENHTAELVIPELPLAHPPNE RTHLVILGAILLCLGVALTFIFRLRKGRMMDVKKCGIQDTNSKKQSDTHLEET (SEQ ID NO: 3), or an active fragment thereof; in some embodiments, the active fragment comprises residues 19 to 290 of the PD-L1 sequence; a HLA-G molecule, which binds to any of inhibitory immune checkpoint molecules KIR2DL4, LILRB1, and LILRB2, and in embodiments has at least 60, 70, 80, 90, 95, 99, or 100% sequence identity, or substantial sequence identity, with a naturally occurring HLA-G. Exemplary HLA-G sequences include, e.g., a mature form found in the sequence at GenBank P17693.1 RecName: Full=HLA class I histocompatibility antigen, alpha chain G; AltName: Full=HLA G antigen; AltName: Full=MHC class I antigen G; Flags: Precursor, or in the sequence

(SEQ ID NO: 4)
MVVMAPRTLFLLLSGALTLTETWAGSHSMRYFSAAVSRPGRGEPRFIAM
GYVDDTQFVRFDSDSACPRMEPRAPWVEQEGPEYWEEETRNTKAHAQTD
RMNLQTLRGYYNQSEASSHTLQWMIGCDLGSDGRLLRGYEQYAYDGKDY
LALNEDLRSWTAADTAAQISKRKCEAANVAEQRRAYLEGTCVEWLHRYL
ENGKEMLQRADPPKTHVTHHPVEDYEATLRCWALGFYPAEIILTWQRDG
EDQTQDVELVETRPAGDGTFQKWAAVVVPSGEEQRYTCHVQHEGLPEPL
MLRWKQSSLPTIPIMGIVA.

[0158] Inhibitory molecule counter ligand molecule, as that term is used herein, refers to a polypeptide having sufficient inhibitory molecule counter ligand sequence such that when present as the ICIM binding/modulating moiety of a multimerized therapeutic compound, can bind and agonize a cognate inhibitory molecule. In some embodiments, the inhibitory molecule counter ligand molecule, when binding as a monomer (or binding when the therapeutic compound is not multimerized), to the inhibitory molecule, does not antagonize, substantially antagonize, prevent binding, or prevent substantial binding, of an endogenous counter ligand of the inhibitory molecule to the inhibitory molecule. In some embodiments, the inhibitory molecule counter ligand molecule when binding as a monomer (or binding when the therapeutic compound is not multimerized), to the inhibitory molecule, does not agonize or substantially agonize, the inhibitory molecule.

[0159] Sequence identity, percentage identity, and related terms, as those terms are used herein, refer to the relatedness of two sequences, e.g., two nucleic acid sequences or two amino acid or polypeptide sequences. In the context of an amino acid sequence, the term “substantially identical” is used herein to refer to a first amino acid that contains a sufficient or minimum number of amino acid residues that are i) identical to, or ii) conservative substitutions of aligned amino acid residues in a second amino acid sequence such that the first and second amino acid sequences can have a common structural domain and/or common functional activity. For example, amino acid sequences that contain a common structural domain having at least about 85%, 90%. 91%, 92%, 93%, 94%, 95%, 96%, 97%, 98% or 99% identity to a reference sequence, e.g., a sequence provided herein.

[0160] In the context of nucleotide sequence, the term “substantially identical” is used herein to refer to a first nucleic acid sequence that contains a sufficient or minimum number of nucleotides that are identical to aligned nucleotides in a second nucleic acid sequence such that the first and second nucleotide sequences encode a polypeptide having common functional activity, or encode a common structural polypeptide domain or a common functional polypeptide activity. For example, nucleotide sequences having at least about 85%, 90%, 91%, 92%, 93%, 94%, 95%, 96%, 97%, 98% or 99% identity to a reference sequence, e.g., a sequence provided herein.

[0161] The term “functional variant” refers to polypeptides that have a substantially identical amino acid sequence to the naturally occurring sequence, or are encoded by a substantially identical nucleotide sequence, and are capable of having one or more activities of the naturally occurring sequence.

[0162] Calculations of homology or sequence identity between sequences (the terms are used interchangeably herein) are performed as follows.

[0163] To determine the percent identity of two amino acid sequences, or of two nucleic acid sequences, the sequences are aligned for optimal comparison purposes (e.g., gaps can be introduced in one or both of a first and a second amino acid or nucleic acid sequence for optimal alignment and non-homologous sequences can be disregarded for comparison purposes). In a preferred embodiment, the length of a reference sequence aligned for comparison purposes is at least 30%, preferably at least 40%, more preferably at least 50%, 60%, and even more preferably at least 70%, 80%, 90%, 100% of the length of the reference sequence. The amino acid residues or nucleotides at corresponding amino acid positions or nucleotide positions are then compared. When a position in the first sequence is occupied by the same amino acid residue or nucleotide as the corresponding position in the second sequence, then the molecules are identical at that position (as used herein amino acid or nucleic acid “identity” is equivalent to amino acid or nucleic acid “homology”).

[0164] The percent identity between the two sequences is a function of the number of identical positions shared by the sequences, taking into account the number of gaps, and the length of each gap, which need to be introduced for optimal alignment of the two sequences.

[0165] The comparison of sequences and determination of percent identity between two sequences can be accomplished using a mathematical algorithm. In a preferred embodiment, the percent identity between two amino acid sequences is determined using the Needleman and Wunsch ((1970) J. Mol. Biol. 48:444-453) algorithm which has been incorporated into the GAP program in the GCG software package (available at http://www.gcg.com), using either a Blossum 62 matrix or a PAM250 matrix, and a gap weight of 16, 14, 12, 10, 8, 6, or 4 and a length weight of 1, 2, 3, 4, 5, or 6. In yet another preferred embodiment, the percent identity between two nucleotide sequences is determined using the GAP program in the GCG software package (available at http://www.gcg.com), using a NWSgapdna.CMP matrix and a gap weight of 40, 50, 60, 70, or 80 and a length weight of 1, 2, 3, 4, 5, or 6. A particularly preferred set of parameters (and the one that should be used unless otherwise specified) are a Blossum 62 scoring matrix with a gap penalty of 12, a gap extend penalty of 4, and a frameshift gap penalty of 5.

[0166] The percent identity between two amino acid or nucleotide sequences can be determined using the algorithm of E. Meyers and W. Miller ((1989) CABIOS, 4:11-17) which has been incorporated into the ALIGN program (version 2.0), using a PAM120 weight residue table, a gap length penalty of 12 and a gap penalty of 4.

[0167] The nucleic acid and protein sequences described herein can be used as a “query sequence” to perform a search against public databases to, for example, identify other family members or related sequences. Such searches can be performed using the NBLAST and) (BLAST programs (version 2.0) of Altschul, et al. (1990) J. Mol. Biol. 215:403-10. BLAST nucleotide searches can be performed with the NBLAST program, score=100, wordlength=12 to obtain nucleotide sequences homologous to for example any a nucleic acid sequence provided herein. BLAST protein searches can be performed with the)(BLAST program, score=50, wordlength=3 to obtain amino acid sequences homologous to protein molecules provided herein. To obtain gapped alignments for comparison purposes, Gapped BLAST can be utilized as described in Altschul et al., (1997) Nucleic Acids Res. 25:3389-3402. When utilizing BLAST and Gapped BLAST programs, the default parameters of the respective programs (e.g.,)(BLAST and NBLAST) can be used. See http://www.ncbi.nlm.nih.gov.

[0168] As used herein, the term “hybridizes under low stringency, medium stringency, high stringency, or very high stringency conditions” describes conditions for hybridization and washing. Guidance for performing hybridization reactions can be found in Current Protocols in Molecular Biology, John Wiley & Sons, N.Y. (1989), 6.3.1-6.3.6, which is incorporated by reference. Aqueous and nonaqueous methods are described in that reference and either can be used. Specific hybridization conditions referred to herein are as follows: 1) low stringency hybridization conditions in 6× sodium chloride/sodium citrate (SSC) at about 45° C., followed by two washes in 0.2×SSC, 0.1% SDS at least at 50° C. (the temperature of the washes can be increased to 55° C. for low stringency conditions); 2) medium stringency hybridization conditions in 6×SSC at about 45° C., followed by one or more washes in 0.2×SSC, 0.1% SDS at 60° C.; 3) high stringency hybridization conditions in 6×SSC at about 45° C., followed by one or more washes in 0.2×SSC, 0.1% SDS at 65° C.; and preferably 4) very high stringency hybridization conditions are 0.5M sodium phosphate, 7% SDS at 65° C., followed by one or more washes at 0.2×SSC, 1% SDS at 65° C. Very high stringency conditions (4) are the preferred conditions and the ones that should be used unless otherwise specified.

[0169] It is understood that the molecules and compounds of the present embodiments may have additional conservative or non-essential amino acid substitutions, which do not have a substantial effect on their functions.

[0170] The term “amino acid” is intended to embrace all molecules, whether natural or synthetic, which include both an amino functionality and an acid functionality and capable of being included in a polymer of naturally occurring amino acids. Exemplary amino acids include naturally occurring amino acids; analogs, derivatives and congeners thereof; amino acid analogs having variant side chains; and all stereoisomers of any of any of the foregoing. As used herein the term “amino acid” includes both the D- or L-optical isomers and peptidomimetics. A “conservative amino acid substitution” is one in which the amino acid residue is replaced with an amino acid residue having a similar side chain. Families of amino acid residues having similar side chains have been defined in the art. These families include amino acids with basic side chains (e.g., lysine, arginine, histidine), acidic side chains (e.g., aspartic acid, glutamic acid), uncharged polar side chains (e.g., glycine, asparagine, glutamine, serine, threonine, tyrosine, cysteine), nonpolar side chains (e.g., alanine, valine, leucine, isoleucine, proline, phenylalanine, methionine, tryptophan), beta-branched side chains (e.g., threonine, valine, isoleucine), and aromatic side chains (e.g., tyrosine, phenylalanine, tryptophan, histidine).

[0171] In some embodiments, the molecule comprises a CD39 molecule, a CD73 molecule, a Cell surface molecule binder, Donor specific targeting moiety Effector ligand binding molecule, ICIM binding/modulating moiety IIC binding/modulating moiety, an inhibitory immune checkpoint molecule ligand molecule, Inhibitory molecule counter ligand molecule, SM binding/modulating moiety, or ICSM binding/modulating moiety.

[0172] SM binding/modulating moiety, as that term is used herein, refers to an effector binding/modulating moiety that, as part of a therapeutic compound, promotes an immunosuppressive local microenvironment, e.g., by providing in the proximity of the target, a substance that inhibits or minimizes attack by the immune system of the target. In some embodiments, the SM binding/modulating moiety comprises, or binds, a molecule that inhibits or minimizes attack by the immune system of the target. In some embodiments, a therapeutic compound comprises an SM binding/modulating moiety that binds and accumulates a soluble substance, e.g., an endogenous or exogenous substance, having immunosuppressive function. In some embodiments, a therapeutic compound comprises an SM binding/modulating moiety that binds and inhibits, sequesters, degrades or otherwise neutralizes a substance, e.g., a soluble substance, typically and endogenous soluble substance, that promotes immune attack. In some embodiments, a therapeutic compound comprises an SM binding/modulating moiety that comprises an immune suppressive substance, e.g. a fragment of protein known to be immunosuppressive. By way of example, an effector molecule binding moiety that binds, or comprises, a substance e.g., a CD39 molecule or a CD73 molecule, that depletes a component, that promotes immune effector cell function, e.g., ATP or AMP.

[0173] Specific targeting moiety, as that term is used herein, refers to donor specific targeting moiety or a tissue specific targeting moiety.

[0174] Subject, as that term is used herein, refers to a mammalian subject, e.g., a human subject. In some embodiments, the subject is a non-human mammal, e.g., a horse, dog, cat, cow, goat, or pig.

[0175] Target ligand binding molecule, as used herein, refers to a polypeptide that has sufficient sequence from a naturally occurring counter ligand of a target ligand that it can bind the target ligand on a target tissue (e.g., donor tissue or subject target tissue) with sufficient specificity that it can serve as a specific targeting moiety. In some embodiments, it binds to target tissue or cells with at least 10, 20, 30, 40, 50, 60, 70, 80, 90, or 95% of the affinity of the naturally occurring counter ligand. In some embodiments, it has at least 60, 70, 80, 90, 95, 99, or 100% sequence identity, or substantial sequence identity, with a naturally occurring counter ligand for the target ligand.

[0176] Target site, as that term is used herein, refers to a site which contains the entity, e.g., epitope, bound by a targeting moiety. In some embodiments, the target site is the site at which immune privilege is established.

[0177] Tissue specific targeting moiety, as that term is used herein, refers to a moiety, e.g., an antibody molecule, that as a component of a therapeutic molecule, localizes the therapeutic molecule preferentially to a target tissue, as opposed to other tissue of a subject. As a component of a therapeutic compound, the tissue specific targeting moiety provides site-specific immune privilege for a target tissue, e.g., an organ or tissue undergoing or at risk for autoimmune attack. In some embodiments, a tissue specific targeting moiety binds to a product, e.g., a polypeptide product, which is not present outside the target tissue, or is present at sufficiently low levels that, at therapeutic concentrations of therapeutic molecule, unacceptable levels of immune suppression are absent or substantially absent. In some embodiments, a tissue specific targeting moiety binds to an epitope, which epitope is not present outside, or not substantially present outside, the target site.

[0178] In some embodiments, a tissue specific targeting moiety, as a component of a therapeutic compound, preferentially binds to a target tissue or target tissue antigen, e.g., has a binding affinity for the target tissue or antigen that is greater for target antigen or tissue, e.g., at least 2, 4, 5, 10, 50, 100, 500, 1,000, 5,000, or 10,000 fold greater, than its affinity for non-target tissue or antigen present outside the target tissue. Affinity of a therapeutic compound of which the tissue specific moiety is a component, can be measured in a cell suspension, e.g., the affinity for suspended cells having the target antigen is compared with its affinity for suspended cells not having the target antigen. In some embodiments, the binding affinity for the target antigen bearing cells is below 10 nM.

[0179] In some embodiments, the binding affinity for the target antigen bearing cells is below 100 pM, 50 pM, or 10 pM. In some embodiments, the specificity for a target antigen is sufficient, that when the tissue specific targeting moiety is coupled to an immune down regulating effector: i) immune attack of the target tissue, e.g., as measured by histological inflammatory response, infiltrating T effector cells, or organ function, in the clinical setting, e.g., creatinine for kidney, is substantially reduced, e.g., as compared to what would be seen in an otherwise similar implant but lacking the tissue specific targeting moiety is coupled to an immune down regulating effector; and/or ii) immune function in the recipient, outside or away from the target tissue, is substantially maintained.

[0180] In some embodiments, one or more of the following is seen: at therapeutic levels of therapeutic compound, peripheral blood lymphocyte counts are not substantially impacted, e.g., the level of T cells is within 25, 50, 75, 85, 90, or 95% of normal, the level of B cells is within 25, 50, 75, 85, 90, or 95% of normal, and/or the level of granulocytes (PMN cells) is within 25, 50, 75, 85, 90, or 95% of normal, or the level of monocytes is within 25, 50, 75, 85, 90, or 95% of normal; at therapeutic levels of therapeutic compound, the ex vivo proliferative function of PBMCs against non-disease relevant antigens is substantially normal or is within 70, 80, or 90% of normal; at therapeutic levels of therapeutic compound, the incidence or risk of opportunistic infections and cancers associated with immunosuppression is not substantially increased over normal; or at therapeutic levels of therapeutic compound, the incidence or risk of opportunistic infections and cancers associated with immunosuppression is substantially less than would be seen with standard of care, or non-targeted, immunosuppression. In some embodiments, the tissue specific targeting moiety comprises an antibody molecule. In some embodiments, the donor specific targeting moiety comprises an antibody molecule, a target specific binding polypeptide, or a target ligand binding molecule. In some embodiments, the tissue specific targeting moiety binds a product, or a site on a product, that is present or expressed exclusively, or substantially exclusively, on target tissue.

ICIM Binding/Modulating Moieties: Effector Binding/Modulating Moieties that Bind Inhibitory Receptors

[0181] Methods and compounds described herein provide for a therapeutic compound having an effector binding/modulating moiety comprising an ICIM binding/modulating moiety, that directly binds and activates an inhibitory receptor on the surface of an immune cell, e.g., to reduce or eliminate, or substantially eliminate, the ability of the immune cell to mediate immune attack. Coupling of the ICIM binding/modulating moiety to a targeting entity, promotes site-specific or local down regulation of the immune cell response, e.g., confined substantially to the locations having binding sites for the targeting moiety. Thus, normal systemic immune function is substantially retained. In some embodiments, an ICIM binding/modulating moiety comprises an inhibitory immune checkpoint molecule counter ligand molecule, e.g., a natural ligand, or fragment of a natural ligand (e.g., PD-L1 or HLA-G) of the inhibitory immune checkpoint molecule. In some embodiments, an ICIM binding/modulating moiety comprises a functional antibody molecule, e.g., a functional antibody molecule comprising an scFv binding domain, that engages inhibitory immune checkpoint molecule.

[0182] In some embodiments, the ICIM binding/modulating moiety, comprising, e.g., a functional antibody molecule, or inhibitory immune checkpoint molecule ligand molecule, binds the inhibitory receptor but does not prevent binding of a natural ligand of the inhibitory receptor to the inhibitory receptor. In embodiments a format is used wherein a targeting moiety is coupled, e.g., fused, to an ICIM binding/modulating moiety, comprising, e.g., an scFv domain, and configured so that upon binding of an inhibitory receptor while in solution (e.g., in blood or lymph) (and presumably in a monomeric format), the therapeutic molecule: i) fails to agonize, or fails to substantially agonize (e.g., agonizes at less than 30, 20, 15, 10, or 5% of the level seen with a full agonizing molecule) the inhibitory receptor on the immune cell; and/or ii) fails to antagonize, or fails to substantially antagonize (e.g., antagonizes at less than 30, 20, 15, 10, or 5% of the level seen with a full antagonizing molecule) the inhibitory receptor on the immune cell. A candidate molecule can be evaluated for its ability to agonize or not agonize by its ability to either increase or decrease the immune response in an in vitro cell based assay wherein the target is not expressed, e.g., using an MLR (mixed lymphocyte reaction) based assay.

[0183] In some embodiments, candidate ICIM binding/modulating moieties can reduce, completely or substantially eliminate systemic immunosuppression and systemic immune activation. In some embodiments, the targeting domain of the therapeutic compound, when bound to target, will serve to cluster or multimerize the therapeutic compound on the surface of the tissue desiring immune protection. In some embodiments, the ICIM binding/modulating moiety, e.g., an ICIM binding/modulating moiety comprising a scFv domain, requires a clustered or multimeric state to be able to deliver an agonistic and immunosuppressive signal, or substantial levels of such signal, to local immune cells. This type of therapeutic can, for example, provide to a local immune suppression whilst leaving the systemic immune system unperturbed or substantially unperterbed. That is, the immune suppression is localized to where the suppression is needed as opposed to being systemic and not localized to a particular area or tissue type.

[0184] In some embodiments, upon binding to the target e.g., a target organ, tissue or cell type, the therapeutic compound coats the target, e.g., target organ, tissue or cell type. When circulating lymphocytes attempt to engage and destroy the target, this therapeutic will provide an ‘off’ signal only at, or to a greater extent at, the site of therapeutic compound accumulation.

[0185] A candidate therapeutic compound can be evaluated for the ability to bind, e.g., specifically bind, its target, e.g., by ELISA, a cell based assay, or surface plasmon resonance. This property should generally be maximized, as it mediates the site-specificity and local nature of the immune privilege. A candidate therapeutic compound can be evaluated for the ability to down regulate an immune cell when bound to target, e.g., by a cell based activity assay. This property should generally be maximized, as it mediates the site-specificity and local nature of the immune privilege. The level of down regulation effected by a candidate therapeutic compound in monomeric (or non-bound) form can be evaluated, e.g., by a cell based activity assay. This property should generally be minimized, as could mediate systemic down regulation of the immune system. The level of antagonism of a cell surface inhibitory molecule, e.g., an inhibitory immune checkpoint molecule, effected by a candidate therapeutic compound in monomeric (or non-bound) form can be evaluated, e.g., by a cell based activity assay. This property should generally be minimized, as could mediate systemic unwanted activation of the immune system. Generally, the properties should be selected and balanced to produce a sufficiently robust site specific immune privilege without unacceptable levels of non-site specific agonism or antagonism of the inhibitory immune checkpoint molecule.

[0186] Exemplary Inhibitory Immune Checkpoint Molecules

[0187] Exemplary inhibitory molecules (e.g., an inhibitory immune checkpoint molecule) (together with their counter ligands) can be found in Table 1. This table lists molecules to which exemplary ICIM binding moieties can bind.

TABLE 1
Cell surface inhibitory molecules, e.g., inhibitory
immune checkpoint molecules (column A), counter ligands
(column B) and cell types affected (column C).

| A | B | C |
|---|---|---|
| PD-1 | PD-L1, PD-L2 | T cells, B cells |
| Alkaline phosphatase | | |
| B7-H3 | Unknown | T cells |
| B7-H4 | Neuropilin 1, | T cells |
| | Neuropilin 2, | |
| | Plexin4A | |
| BTLA | HVEM | T cells, B cells |
| CTLA-4 | CD80, CD86 | T cells |
| IDO1 | Tryptophan | Lymphocytes |
| IDO2 | Tryptophan | Lymphocytes |
| KIR2DL1, | HLA MHC class I | NK cells |
| KIR2DL2/3, | | |
| KIR3DL1, KIR3DL2 | | |
| LAG3 | HLA MHC class II | T cells |
| TIM-3 | Galectin-9 | T cells |
| VISTA | Unknown | T cells, myeloid cells |
| TIGIT | CD155 | T cells |
| KIR2DL4 | HLA-G | NK cells |
| LILRB1 | HLA-G | T cells, NK cells, B cells, |
| | | monocytes, dendritic cells |
| LILRB2 | HLA-G | Monocytes, dendritic cells, |
| | | neutrophils, some tumor |
| | | cells |
| NKG2A | Nonclassical MHC | T cells, NK cells |
| | Glycoproteins | |
| | class I | |
| FCRL1-6 | FCRL1 - 2 not | B cells |
| | known | |
| | FCRL4 = IgA | |
| | FCRL5 = IgG | |
| | FCRL6 = MHC | |
| | Class II | |
| | BUTYROPHILINS, | Modulation of |
| | for example | immune cells |
| | BTN1A1, BTN2A2, | |
| | BTNL2, BTNL1, | |
| | BTNL8 | |

[0188] The PD-L1/PD-1 Pathway

[0189] Programmed cell death protein 1, (often referred to as PD-1) is a cell surface receptor that belongs to the immunoglobulin superfamily. PD-1 is expressed on T cells and other cell types including, but not limited to, B cells, myeloid cells, dendritic cells, monocytes, T regulatory cells, iNK T cells. PD-1 binds two ligands, PD-L1 and PD-L2, and is an inhibitory immune checkpoint molecule. Engagement with a cognate ligand, PD-L1 or PD-L2, in the context of engagement of antigen loaded MEW with the T cell receptor on a T cell minimizes or prevents the activation and function of T cells. The inhibitory effect of PD-1 can include both promoting apoptosis (programmed cell death) in antigen specific T cells in lymph nodes and reducing apoptosis in regulatory T cells (suppressor T cells).

[0190] In some embodiments, a therapeutic compound comprises an ICIM binding/modulating moiety which agonizes PD-1 inhibition. An ICIM binding/modulating moiety can include an inhibitory molecule counter ligand molecule, e.g., comprising a fragment of a ligand of PD-1 (e.g., a fragment of PD-L1 or PD-L2) or another moiety, e.g., a functional antibody molecule, comprising, e.g., an scFv domain that binds PD-1.

[0191] In some embodiments, a therapeutic compound comprises a targeting moiety that is preferentially binds a donor antigen not present in, or present in substantially lower levels in the subject, e.g., a donor antigen from Table 2, and is localized to donor graft tissue in a subject. In some embodiments, it does not bind, or does not substantially bind, other tissues. In some embodiments, a therapeutic compound can include a targeting moiety that is specific for HLA-A2 and specifically binds donor allograft tissue but does not bind, or does not substantially bind, host tissues. In some embodiments, the therapeutic compound comprises an ICIM binding/modulating moiety, e.g., an inhibitory molecule counter ligand molecule, e.g., comprising a fragment of a ligand of PD-1 (e.g., a fragment of PD-L1 or PD-L2) or another moiety, e.g., a functional antibody molecule, comprising, e.g., an scFv domain that binds PD-1, such that the therapeutic compound, e.g., when bound to target, activates PD-1. The therapeutic compound targets an allograft and provides local immune privilege to the allograft.

[0192] In some embodiments, a therapeutic compound comprises a targeting moiety that is preferentially binds to an antigen of Table 3, and is localized to the target in a subject, e.g., a subject having an autoimmune disorder, e.g., an autoimmune disorder of Table 3. In some embodiments, it does not bind, or does not substantially bind, other tissues. In some embodiments, the therapeutic compound comprises an ICIM binding/modulating moiety, e.g., an inhibitory molecule counter ligand molecule, e.g., comprising a fragment of a ligand of PD-1 (e.g., a fragment of PD-L1 or PD-L2) or another moiety, e.g., a functional antibody molecule, comprising, e.g., an scFv domain that binds PD-1, such that the therapeutic compound, e.g., when bound to target, activates PD-1. The therapeutic compound targets a tissue subject to autoimmune attack and provides local immune privilege to the tissue.

[0193] PD-L1 and PDL2, or polypeptides derived therefrom, can provide candidate ICIM binding moieties. However, in monomer form, e.g., when the therapeutic compound is circulating in blood or lymph, this molecule could have an undesired effect of antagonizing the PD-L1/PD-1 pathway, and may only agonize the PD-1 pathway when clustered or multimerized on the surface of a target, e.g., a target organ. In some embodiments, a therapeutic compound comprises an ICIM binding/modulating moiety comprising a functional antibody molecule, e.g., a scFv domain, that is inert, or substantially inert, to the PD-1 pathway in a soluble form but which agonizes and drives an inhibitory signal when multimerized (by the targeting moiety) on the surface of a tissue.

[0194] The HLA-G: KIR2DL4/LILRB1/LILRB2 Pathway

[0195] KIR2DL4, LILRB1, and LILRB2 are inhibitory molecules found on T cells, NK cells, and myeloid cells. HLA-G is a counter ligand for each.

[0196] KIR2DL4 is also known as CD158D, G9P, KIR-103AS, KIR103, KIR103AS, KIR, KIR-2DL4, killer cell immunoglobulin like receptor, and two Ig domains and long cytoplasmic tail 4. LILRB1 is also known as LILRB1, CD85J, ILT-2, ILT2, LIR-1, LIR1, MIR-7, MIR7, PIR-B, PIRB, leukocyte immunoglobulin like receptor B1. LILRB2 is also known as CD85D, ILT-4, LIR-2, LIR2, MIR-10, MIR10, and ILT4.

[0197] A therapeutic compound comprising an HLA-G molecule can be used to provide inhibitory signals to an immune cell comprising any of KIR2DL4, LILRB1, and LILRB2, e.g., with multimerized therapeutic compound molecules comprising an HLA-G molecule and thus provide site-specific immune privilege.

[0198] A therapeutic compound comprising an agonistic anti-KIR2DL4, anti-LILRB1, or anti-LILRB2 antibody molecule can be used to provide inhibitory signals to an immune cell comprising any of KIR2DL4, LILRB1, and LILRB2.

[0199] HLA-G only delivers an inhibitory signal when multimerized, for example, when expressed on the surface of a cell or when conjugated to the surface of a bead. In embodiments, a therapeutic compound comprising an HLA-G molecule which therapeutic compound does not multimerize in solution (or does not multimerize sufficiently to result in significant levels of inhibitory molecule agonization), is provided. The use of HLA-G molecules that minimize mulitmerization in solution will minimize systemic agonization of immune cells and unwanted immune suppression.

[0200] While not wishing to be bound by theory, it is believed that HLA-G is not effective in down regulation unless multimerized, that binding of the therapeutic compound to target, through the targeting moiety, multimerizes the ICIM binding entity, and that the multimerized ICIM binding entity, binds and clusters inhibitory molecules on the surface of an immune cell, thus mediating a negative signal that down regulates the immune cell. Thus, infiltrating immune cells attempting to damage the target tissue, including antigen presenting cells and other myeloid cells, NK cells and T cells, are down regulated.

[0201] While HLA-G molecules minimize antagonism when in monomeric form are desirable, the redundancy of LILRB1 and LILRB2 will minimize the impact on a systemic effect even with some monomeric antagonism.

[0202] In some embodiments, the therapeutic compound comprises an ICIM binding/modulating moiety that comprises a HLA-G molecule, e.g., an B2M-free isoform (e.g., HLA-G5), see Carosella et al., Advances in Immunology, 2015, 127:33. In a B2M-free format, HLA-G preferentially binds LILRB2.

[0203] Suitable sequences for the construction of HLA-G molecules include GenBank P17693.1 RecName: Full=HLA class I histocompatibility antigen, alpha chain G; AltName: Full=HLA G antigen; AltName: Full=MHC class I antigen G; Flags: Precursor, or MVVMAPRTLFLLLSGALTLTETWAGSHSMRYFSAAVSRPGRGEPRFIAMGYVDDTQFV RFDSDSACPRMEPRAPWVEQEGPEYWEEETRNTKAHAQTDRMNLQTLRGYYNQSEAS SHTLQWMIGCDLGSDGRLLRGYEQYAYDGKDYLALNEDLRSWTAADTAAQISKRKCE AANVAEQRRAYLEGTCVEWLHRYLENGKEMLQRADPPKTHVTHHPVFDYEATLRCW ALGFYPAEIILTWQRDGEDQTQDVELVETRPAGDGTFQKWAAVVVPSGEEQRYTCHVQ HEGLPEPLMLRWKQSSLPTIPIMGIVAGLVVLAAVVTGAAVAAVLWRKKSSD (SEQ ID NO: 5). A candidate HLA-G molecule can be tested for suitability for use in methods and compounds, e.g., by methods analogous to those described in “Synthetic HLA-G proteins for therapeutic use in transplantation,” LeMaoult et al., 2013 The FASEB Journal 27:3643.

[0204] In some embodiments, a therapeutic compound comprises a targeting moiety that is preferentially binds a donor antigen not present in, or present in substantially lower levels in the subject, e.g., a donor antigen from Table 2, and is localized to donor graft tissue in a subject. In some embodiments, it does not bind, or does not substantially bind, other tissues. In some embodiments, a therapeutic compound can include a targeting moiety that is specific for HLA-A2 and specifically binds a donor allograft but does not bind host tissues and is combined with an ICIM binding/modulating moiety that comprises a HLA-G molecule that binds KIR2DL4, LILRB1, or LILRB2, such that the therapeutic compound, e.g., when bound to target, activates KIR2DL4, LILRB1, or LILRB2. The therapeutic compound targets an allograft and provides local immune privilege to the allograft.

[0205] In some embodiments, a therapeutic compound comprises a targeting moiety that is preferentially binds a tissue specific antigen, e.g., an antigen from Table 3, and is localized to the target site in a subject, e.g., a subject having an autoimmune disorder, e.g., an autoimmune disorder from Table 3. In some embodiments, it does not bind, or does not substantially bind, other tissues. In embodiments the therapeutic compound comprises an ICIM binding/modulating moiety that comprises a HLA-G molecule binds KIR2DL4, LILRB1, or LILRB2, such that the therapeutic compound, e.g., when bound to target, activates KIR2DL4, LILRB1, or LILRB2. The therapeutic compound targets an tissue subject to autoimmune attack and provides local immune privilege to the tissue.

[0206] It is likely possible to engineer a stable and soluble HLA-G-B2M fusion protein that can also bind LILRB1. For example, the crystal structure of HLA-G was determined using HLA-G/B2M monomers (Clements et al. 2005 PNAS 102:3360)

[0207] FCRL Family

[0208] FCRL1-6 generally inhibit B cell activation or function. These type 1 transmembrane glycoproteins are composed of different combinations of 5 types of immunoglobulin-like domains, with each protein consisting of 3 to 9 domains, and no individual domain type conserved throughout all of the FCRL proteins. In general, FCRL expression is restricted to lymphocytes, with the primary expression in B lymphocytes. Generally, FCRLs function to repress B cell activation.

[0209] In some embodiments, an ICIM binding/modulating moiety can comprise an agonistic anti-FCRL antibody molecule. In some embodiments, the therapeutic compound comprises an anti-FCRL antibody molecule and an anti-B cell receptor (BCR) antibody molecule. While not wishing to be bound be theory, it is believed that a therapeutic compound comprising antibody molecules of both specificities will bring the FCRL into close proximity with the BCR and inhibit BCR signaling.

[0210] Butyrophilins and Butyrophilin-Like Molecules

[0211] Effector binding/modulating moiety can comprise an agonist or antagonist of a butyrophilin. In some embodiments, an effector binding/modulating moiety an agonistic or functional BTN1A1 molecule, BTN2A2 molecule, BTNL2 molecule, or BTNL1 molecule.

[0212] A functional BTNXi molecule (where Xi=1A1, 2A2, L2, or L1), as that term as used herein, refers to a polypeptide having sufficient BTNXi sequence that, as part of a therapeutic compound, it inhibits T cells. In some embodiments, a BTNXi molecule has at least 60, 70, 80, 90, 95, 99, or 100% sequence identity, or substantial sequence identity, with a naturally occurring butyrophilin or butyrophilin-like molecule.

[0213] In some embodiments, an effector binding/modulating moiety an antagonistic BTNL8 molecule.

[0214] An antagonistic BTNL8 molecule, as that term as used herein, refers to a polypeptide having sufficient BTNL8 sequence that, as part of a therapeutic compound, it inhibits the activation, proliferation, or secretion of cytokine by a resting T cell. In some embodiments, a BTNL8 molecule has at least 60, 70, 80, 90, 95, 99, or 100% sequence identity, or substantial sequence identity, with a naturally occurring butyrophilin.

[0215] IIC Binding/Modulating Moieties: Effector Binding/Modulating Moieties that Recruit Immunosuppressive T Cells

[0216] In some embodiments, a therapeutic compound comprises an effector binding/modulating moiety, e.g., an IIC binding/modulating moiety, that binds, activates, or retains immunosuppressive cells, e.g., immunosuppressive T cells, at the site mediated by the targeting moiety, providing site-specific immune privilege. The IIC binding/modulating moiety, e.g., an IIC binding/modulating moiety comprising an antibody molecule, comprising, e.g., an scFv binding domain, binds immunosuppressive cell types, e.g., Tregs, e.g., Foxp3+CD25+ Tregs. Organ, tissue or specific cell type tolerance is associated with an overwhelming increase of Tregs proximal and infiltrating the target organ; in embodiments, the methods and compounds described herein synthetically re-create and mimic this physiological state. Upon accumulation of Tregs, an immunosuppressive microenvironment is created that serves to protect the organ of interest from the immune system.

[0217] GARP-Binders as a Treg and TGFB Targeting Molecule

[0218] GARP is a membrane protein receptor for latent TGF-beta expressed on the surface of activated Tregs (Tran et al. 2009 PNAS 106:13445 and Wang et al. 2009 PNAS 106:13439). In some embodiments, a therapeutic compound comprises an IIC binding entity that binds one or both of soluble GARP and GARP-expressing cells, such as activated human Tregs, and a targeting moiety that targets the therapeutic compound to the target tissue of interest. IIC binding/modulating moieties that comprises a GARP binder include, e.g., an IIC binding/modulating moiety that comprises an anti-GARP antibody molecule, e.g., an anti-GARP scFv domain. While not wishing to be bound by theory, it is believed that the therapeutic compound that comprises a GARP binder effects accumulation of GARP-expressing Tregs at the site targeted by the targeting moiety of the therapeutic compound, e.g., a transplant or site of organ injury. Again, while not wishing to be bound by theory, it is believed that a therapeutic compound that comprises a GARP binder can also effect accumulation of soluble GARP at site of organ injury, which will serve to bind and activate TGFB1, an immunosuppressive cytokine, in a local manner (Fridrich et al 2016 PLoS One 11:e0153290; doi: 10.1371/journal.pone.0153290, and Hahn et al 2013 Blood 15:1182). Thus, an effector binding/modulating moiety that comprises a GARP binder can act as either a IIC binding/modulating moiety or an SM binding/modulating moiety.

[0219] CTLA-4 as a Treg Targeting and T Effector Cell Silencing Molecule

[0220] In some embodiments, an effector binding/modulating moiety, e.g., comprises an antibody molecule, e.g., an scFv domain, that binds CTLA-4 expressed on the surface of Tregs. The therapeutic molecule accumulates or retains CTLA-4+ Tregs at the target site, with local immunosuppression the consequence.

[0221] Though expressed more highly on Tregs, CTLA-4 is also expressed on activated T cells. A therapeutic compound comprising an effector binding/modulating moiety, e.g., an anti-CTLA-4 antibody, or a functional anti-CTLA-4 antibody, can down regulate the CTLA-4 expressing T cell. Thus, in a therapeutic compound comprising an effector binding/modulating moiety that binds CTLA-4, the effector moiety can also act as an ICIM binding/modulating moiety.

[0222] In some embodiments, the anti-CTLA-4 binder is neither antagonizing, or agonizing when in monomeric format, and is only agonizing when clustered or multimerized upon binding to the target.

[0223] While not wishing to be bound by theory, it is believed that the binding of the therapeutic compound, via the targeting moiety, to the target, effects multimerization of therapeutic compound. In the case of memory and activated T cells, CTLA-4 bound by the effector binding/modulating moiety of the therapeutic compound, is clustered, and an inhibitory signal by engagement of CTLA-4 expressed by memory and activated T cells.

[0224] In some embodiments, the anti-CTLA-4 binder is neither antagonizing, or agonizing when in monomeric format, and is only agonizing when clustered or multimerized upon binding to the target.

IL-2 Mutein Molecules: IL-2 Receptor Binders that Activate Tregs

[0225] IL-2 mutein molecules that preferentially expand or stimulate Treg cells (over cytotoxic T cells) can be used as an IIC binding/modulating moiety.

[0226] In some embodiments, IIC binding/modulating moiety comprises a IL-2 mutein molecule. As used herein, the term “IL-2 mutein molecule” or “IL-2 mutein” refers to an IL-2 variant that preferentially activates Treg cells. In some embodiments, either alone, or as a component of a therapeutic compound, an IL-2 mutein molecule activates Tregs at least 2, 5, 10, or 100 fold more than cytotoxic T cells. A suitable assay for evaluating preferential activation of Treg cells can be found in U.S. Pat. No. 9,580,486 at, for example, Examples 2 and 3, or in WO2016014428 at, for example, Examples 3, 4, and 5, each of which is incorporated by reference in its entirety. The sequence of mature IL-2 is

(mature IL-2 sequence)
(SEQ ID NO: 6)
APTSSSTKKTQLQLEHLLLDLQMILNGINNYKNPKLTRMLT
FKFYMPKKATELKHLQCLEEELKPLEEVLNLAQSKNFHLRP
RDLISNINVIVLELKGSETTFMCEYADETATIVEFLNRWITFC
QSIISTLT

The immature sequence of IL-2 can be represented by

(SEQ ID NO: 15)
MYRMQLLSCIALSLALVTNSAPTSSSTKKTQLQLEHLLLDL
QMILNGINNYKNPKLTRMLTFKFYMPKKATELKHLQCLEE
ELKPLEEVLNLAQSKNFHLRPRDLISNINVIVLELKGSETTF
[sequence omitted]

[0227] In some embodiments, an IIC binding/modulating moiety comprises an IL-2 mutein, or active fragment thereof, coupled, e.g., fused, to another polypeptide, e.g., a polypeptide that extends in vivo half-life, e.g., an immunoglobulin constant region, or a multimer or dimer thereof.

[0228] An IL-2 mutein molecule can be prepared by mutating one or more of the residues of IL-2. Non-limiting examples of IL-2-muteins can be found in WO2016/164937, U.S. Pat. Nos. 9,580,486, 7,105,653, 9,616,105, 9,428,567, US2017/0051029, US2014/0286898A1, WO2014153111A2, WO2010/085495, WO2016014428A2, WO2016025385A1, and US20060269515, each of which are incorporated by reference in its entirety.

[0229] In some embodiments, the alanine at position 1 of the sequence above is deleted. In some embodiments, the IL-2 mutein molecule comprises a serine substituted for cysteine at position 125 of the mature IL-2 sequence. Other combinations of mutations and substitutions that are IL-2 mutein molecules are described in US20060269515, which is incorporated by reference in its entirety. In some embodiments, the cysteine at position 125 is also substituted with a valine or alanine. In some embodiments, the IL-2 mutein molecule comprises a V91K substitution. In some embodiments, the IL-2 mutein molecule comprises a N88D substitution. In some embodiments, the IL-2 mutein molecule comprises a N88R substitution. In some embodiments, the IL-2 mutein molecule comprises a substitution of H16E, D84K, V91N, N88D, V91K, or V91R, any combinations thereof. In some embodiments, these IL-2 mutein molecules also comprise a substitution at position 125 as described herein. In some embodiments, the IL-2 mutein molecule comprises one or more substitutions selected from the group consisting of: T3N, T3A, L12G, L12K, L12Q, L12S, Q13G, E15A, E15G, E15S, H16A, H16D, H16G, H16K, H16M, H16N, H16R, H16S, H16T, H16V, H16Y, L19A, L19D, L19E, L19G, L19N, L19R, L19S, L19T, L19V, D20A, D20E, D20H, D20I, D20Y, D20F, D20G, D20T, D20W, M23R, R81A, R81G, R81S, R81T, D84A, D84E, D84G, D84I, D84M, D84Q D84R, D84S, D84T, S87R, N88A, N88D, N88E, N88I, N88F, N88G, N88M, N88R, N88S, N88V, N88W, V91D, V91E, V91G, V91S, I92K, I92R, E95G, and Q126. In some embodiments, the amino acid sequence of the IL-2 mutein molecule differs from the amino acid sequence set forth in mature IL-2 sequence with a C125A or C125S substitution and with one substitution selected from T3N, T3A, L12G, L12K, L12Q L12S, Q13G, E15A, E15G, E15S, H16A, H16D, H16G, H16K, H16M, H16N, H16R, H16S, H16T, H16V, H16Y, L19A, L19D, L19E, L19G, L19N, L19R, L19S, L19T, L19V, D20A, D20E, D20F, D20G, D20T, D20W, M23R, R81A, R81G, R81S, R81T, D84A, D84E, D84G, D84I, D84M, D84Q, D84R, D84S, D84T, S87R, N88A, N88D, N88E, N88F, N88I, N88G, N88M, N88R, N88S, N88V, N88W, V91D, V91E, V91G, V91S, I92K, I92R, E95G, Q126I, Q126L, and Q126F. In some embodiments, the IL-2 mutein molecule differs from the amino acid sequence set forth in mature IL-2 sequence with a C125A or C125S substitution and with one substitution selected from D20H, D20I, D20Y, D20E, D20G, D20W, D84A, D84S, H16D, H16G, H16K, H16R, H16T, H16V, I92K, I92R, L12K, L19D, L19N, L19T, N88D, N88R, N88S, V91D, V91G, V91K, and V91S. In some embodiments, the IL-2 mutein comprises N88R and/or D20H mutations.

[0230] In some embodiments, the IL-2 mutein molecule comprises a mutation in the polypeptide sequence at a position selected from the group consisting of amino acid 30, amino acid 31, amino acid 35, amino acid 69, and amino acid 74. In some embodiments, the mutation at position 30 is N30S. In some embodiments, the mutation at position 31 is Y31H. In some embodiments, the mutation at position 35 is K35R. In some embodiments, the mutation at position 69 is V69A. In some embodiments, the mutation at position 74 is Q74P. In some embodiments, the mutein comprises a V69A mutation, a Q74P mutation, a N88D or N88R mutation, and one or more of L53I, L56I, L80I, or L118I mutations. In some embodiments, the mutein comprises a V69A mutation, a Q74P mutation, a N88D or N88R mutation, and a L to I mutation selected from the group consisting of: L53I, L56I, L80I, and L118I mutation. In some embodiments, the IL-2 mutein comprises a V69A, a Q74P, a N88D or N88R mutation, and a L53I mutation. In some embodiments, the IL-2 mutein comprises a V69A, a Q74P, a N88D or N88R mutation, and a L56I mutation. In some embodiments, the IL-2 mutein comprises a V69A, a Q74P, a N88D or N88R mutation, and a L80I mutation. In some embodiments, the IL-2 mutein comprises a V69A, a Q74P, a N88D or N88R mutation, and a L118I mutation. As provided for herein, the muteins can also comprise a C125A or C125S mutation.

[0231] In some embodiments, the mutein comprises a T3A mutation. The full length IL-2 muteins provided herein may not be illustrated with a T3A or other mutations provided for herein, but such mutations can be added into the muteins provided herein as is the case for any of the other mutations illustrated herein. Accordingly, In some embodiments, the mutein comprises a T3N mutation. In some embodiments, the mutein comprises a T3A mutation. In some embodiments, the mutein comprises a L12G mutation. In some embodiments, the mutein comprises a L12K mutation. In some embodiments, the mutein comprises a L12Q mutation. In some embodiments, the mutein comprises a L12S mutation. In some embodiments, the mutein comprises a Q13G mutation. In some embodiments, the mutein comprises a E15A mutation. In some embodiments, the mutein comprises a E15G mutation. In some embodiments, the mutein comprises a E15S mutation. In some embodiments, the mutein comprises a H16A mutation. In some embodiments, the mutein comprises a H16D mutation. In some embodiments, the mutein comprises a H16G mutation. In some embodiments, the mutein comprises a H16K mutation. In some embodiments, the mutein comprises a H16M mutation. In some embodiments, the mutein comprises a H16N mutation. In some embodiments, the mutein comprises a H16R mutation. In some embodiments, the mutein comprises a H16S mutation. In some embodiments, the mutein comprises a H16T mutation. In some embodiments, the mutein comprises a H16V mutation. In some embodiments, the mutein comprises a H16Y mutation. In some embodiments, the mutein comprises a L19A mutation. In some embodiments, the mutein comprises a L19D mutation. In some embodiments, the mutein comprises a L19E mutation. In some embodiments, the mutein comprises a L19G mutation. In some embodiments, the mutein comprises a L19N mutation. In some embodiments, the mutein comprises a L19R mutation. In some embodiments, the mutein comprises a L19S mutation. In some embodiments, the mutein comprises a L19T mutation. In some embodiments, the mutein comprises a L19V mutation. In some embodiments, the mutein comprises a D20A mutation. In some embodiments, the mutein comprises a D20E mutation. In some embodiments, the mutein comprises a D20H mutation. In some embodiments, the mutein comprises a D20I mutation. In some embodiments, the mutein comprises a D20Y mutation. In some embodiments, the mutein comprises a D20F mutation. In some embodiments, the mutein comprises a D20G mutation. In some embodiments, the mutein comprises a D20T mutation. In some embodiments, the mutein comprises a D20W mutation. In some embodiments, the mutein comprises a M23R mutation. In some embodiments, the mutein comprises a R81A mutation. In some embodiments, the mutein comprises a R81G mutation. In some embodiments, the mutein comprises a R81S mutation. In some embodiments, the mutein comprises a R81T mutation. In some embodiments, the mutein comprises a D84A mutation. In some embodiments, the mutein comprises a D84E mutation. In some embodiments, the mutein comprises a D84G mutation. In some embodiments, the mutein comprises a D84I mutation. In some embodiments, the mutein comprises a D84M mutation. In some embodiments, the mutein comprises a D84Q mutation. In some embodiments, the mutein comprises a D84R mutation. In some embodiments, the mutein comprises a D84S mutation. In some embodiments, the mutein comprises a D84T mutation. In some embodiments, the mutein comprises a S87R mutation. In some embodiments, the mutein comprises a N88A mutation. In some embodiments, the mutein comprises a N88D mutation. In some embodiments, the mutein comprises a N88E mutation. In some embodiments, the mutein comprises a N88I mutation. In some embodiments, the mutein comprises a N88F mutation. In some embodiments, the mutein comprises a N88G mutation. In some embodiments, the mutein comprises a N88M mutation. In some embodiments, the mutein comprises a N88R mutation. In some embodiments, the mutein comprises a N88S mutation. In some embodiments, the mutein comprises a N88V mutation. In some embodiments, the mutein comprises a N88W mutation. In some embodiments, the mutein comprises a V91D mutation. In some embodiments, the mutein comprises a V91E mutation. In some embodiments, the mutein comprises a V91G mutation. In some embodiments, the mutein comprises a V91S mutation. In some embodiments, the mutein comprises a I92K mutation. In some embodiments, the mutein comprises a I92R mutation. In some embodiments, the mutein comprises a E95G mutation. In some embodiments, the mutein comprises a Q126 mutation.

[0232] Although the mutations are illustrated in list form, this is simply for convenience and the muteins may have one or more of the substitutions provided herein.

[0233] In some embodiments, the IL-2 mutein molecule comprises a substitution selected from the group consisting of: N88R, N88I, N88G, D20H, D109C, Q126L, Q126F, D84G, or D84I relative to mature human IL-2 sequence provided above. In some embodiments, the IL-2 mutein molecule comprises a substitution of D109C and one or both of a N88R substitution and a C125S substitution. In some embodiments, the cysteine that is in the IL-2 mutein molecule at position 109 is linked to a polyethylene glycol moiety, wherein the polyethylene glycol moiety has a molecular weight of between 5 and 40 kDa.

[0234] In some embodiments, any of the substitutions described herein are combined with a substitution at position 125. The substitution can be a C125S, C125A, or C125V substitution.

[0235] In addition to the substitutions or mutations described herein, in some embodiments, the IL-2 mutein has a substitution/mutation at one or more of positions 73, 76, 100, or 138 that correspond to SEQ ID NO: 15 or positions at one or more of positions 53, 56, 80, or 118 that correspond to SEQ ID NO: 6. In some embodiments, the IL-2 mutein comprises a mutation at positions 73 and 76; 73 and 100; 73 and 138; 76 and 100; 76 and 138; 100 and 138; 73, 76, and 100; 73, 76, and 138; 73, 100, and 138; 76, 100 and 138; or at each of 73, 76, 100, and 138 that correspond to SEQ ID NO: 15. In some embodiments, the IL-2 mutein comprises a mutation at positions 53 and 56; 53 and 80; 53 and 118; 56 and 80; 56 and 118; 80 and 118; 53, 56, and 80; 53, 56, and 118; 53, 80, and 118; 56, 80 and 118; or at each of 53, 56, 80, and 118 that correspond to SEQ ID NO: 6. As the IL-2 can be fused or tethered to other proteins, as used herein, the term corresponds to as reference to a SEQ ID NOs: 6 or 15 refer to how the sequences would align with default settings for alignment software, such as can be used with the NCBI website. In some embodiments, the mutation is leucine to isoleucine. Thus, the IL-2 mutein can comprise one more isoleucines at positions 73, 76, 100, or 138 that correspond to SEQ ID NO: 15 or positions at one or more of positions 53, 56, 80, or 118 that correspond to SEQ ID NO: 6. In some embodiments, the mutein comprises a mutation at L53 that correspond to SEQ ID NO: 6. In some embodiments, the mutein comprises a mutation at L56 that correspond to SEQ ID NO: 6. In some embodiments, the mutein comprises a mutation at L80 that correspond to SEQ ID NO: 6. In some embodiments, the mutein comprises a mutation at L118 that correspond to SEQ ID NO: 6. In some embodiments, the mutation is leucine to isoleucine. In some embodiments, the mutein also comprises a mutation as position 69, 74, 88, 125, or any combination thereof in these muteins that correspond to SEQ ID NO: 6. In some embodiments, the mutation is a V69A mutation. In some embodiments, the mutation is a Q74P mutation. In some embodiments, the mutation is a N88D or N88R mutation. In some embodiments, the mutation is a C125A or C125S mutation.

[0236] In some embodiments, the IL-2 mutein comprises a mutation at one or more of positions 49, 51, 55, 57, 68, 89, 91, 94, 108, and 145 that correspond to SEQ ID NO: 15 or one or more positions 29, 31, 35, 37, 48, 69, 71, 74, 88, and 125 that correspond to SEQ ID NO: 6. The substitutions can be used alone or in combination with one another. In some embodiments, the IL-2 mutein comprises substitutions at 2, 3, 4, 5, 6, 7, 8, 9, or each of positions 49, 51, 55, 57, 68, 89, 91, 94, 108, and 145. Non-limiting examples such combinations include, but are not limited to, a mutation at positions 49, 51, 55, 57, 68, 89, 91, 94, 108, and 145; 49, 51, 55, 57, 68, 89, 91, 94, and 108; 49, 51, 55, 57, 68, 89, 91, and 94; 49, 51, 55, 57, 68, 89, and 91; 49, 51, 55, 57, 68, and 89; 49, 51, 55, 57, and 68; 49, 51, 55, and 57; 49, 51, and 55; 49 and 51; 51, 55, 57, 68, 89, 91, 94, 108, and 145; 51, 55, 57, 68, 89, 91, 94, and 108; 51, 55, 57, 68, 89, 91, and 94; 51, 55, 57, 68, 89, and 91; 51, 55, 57, 68, and 89; 55, 57, and 68; 55 and 57; 55, 57, 68, 89, 91, 94, 108, and 145; 55, 57, 68, 89, 91, 94, and 108; 55, 57, 68, 89, 91, and 94; 55, 57, 68, 89, 91, and 94; 55, 57, 68, 89, and 91; 55, 57, 68, and 89; 55, 57, and 68; 55 and 57; 57, 68, 89, 91, 94, 108, and 145; 57, 68, 89, 91, 94, and 108; 57, 68, 89, 91, and 94; 57, 68, 89, and 91; 57, 68, and 89; 57 and 68; 68, 89, 91, 94, 108, and 145; 68, 89, 91, 94, and 108; 68, 89, 91, and 94; 68, 89, and 91; 68 and 89; 89, 91, 94, 108, and 145; 89, 91, 94, and 108; 89, 91, and 94; 89 and 91; 91, 94, 108, and 145; 91, 94, and 108; 91, and 94; or 94 and 108. Each mutation can be combined with one another. The same substitutions can be made in SEQ ID NO: 6, but the numbering would adjusted appropriately as is clear from the present disclosure (20 less than the numbering for SEQ ID NO: 15 corresponds to the positions in SEQ ID NO: 6).

[0237] In some embodiments, the IL-2 mutein comprises a mutation at one or more positions of 35, 36, 42, 104, 115, or 146 that correspond to SEQ ID NO: 15 or the equivalent positions at SEQ ID NO: 6 (e.g., positions 15, 16, 22, 84, 95, or 126). These mutations can be combined with the other leucine to isoleucine mutations described herein or the mutation at positions 73, 76, 100, or 138 that correspond to SEQ ID NO: 15 or at one or more of positions 53, 56, 80, or 118 that correspond to SEQ ID NO: 6. In some embodiments, the mutation is a E35Q, H36N, Q42E, D104N, E115Q, or Q146E, or any combination thereof. In some embodiments, one or more of these substitutions is wild-type. In some embodiments, the mutein comprises a wild-type residue at one or more of positions 35, 36, 42, 104, 115, or 146 that correspond to SEQ ID NO: 15 or the equivalent positions at SEQ ID NO: 6 (e.g., positions 15, 16, 22, 84, 95, and 126).

[0238] The mutations at these positions can be combined with any of the other mutations described herein, including, but not limited to substitutions at positions 73, 76, 100, or 138 that correspond to SEQ ID NO: 15 or positions at one or more of positions 53, 56, 80, or 118 that correspond to SEQ ID NO: 6 described herein and above. In some embodiments, the IL-2 mutein comprises a N49S mutation that corresponds to SEQ ID NO: 15. In some embodiments, the IL-2 mutein comprises a Y51S or a Y51H mutation that corresponds to SEQ ID NO: 15. In some embodiments, the IL-2 mutein comprises a K55R mutation that corresponds to SEQ ID NO: 15. In some embodiments, the IL-2 mutein comprises a T57A mutation that corresponds to SEQ ID NO: 15. In some embodiments, the IL-2 mutein comprises a K68E mutation that corresponds to SEQ ID NO: 15. In some embodiments, the IL-2 mutein comprises a V89A mutation that corresponds to SEQ ID NO: 15. In some embodiments, the IL-2 mutein comprises a N91R mutation that corresponds to SEQ ID NO: 15. In some embodiments, the IL-2 mutein comprises a Q94P mutation that corresponds to SEQ ID NO: 15. In some embodiments, the IL-2 mutein comprises a N108D or a N108R mutation that corresponds to SEQ ID NO: 15. In some embodiments, the IL-2 mutein comprises a C145A or C145S mutation that corresponds to SEQ ID NO: 15. These substitutions can be used alone or in combination with one another. In some embodiments, the mutein comprises each of these substitutions. In some embodiments, the mutein comprises 1, 2, 3, 4, 5, 6, 7, or 8 of these mutations. In some embodiments, the mutein comprises a wild-type residue at one or more of positions 35, 36, 42, 104, 115, or 146 that correspond to SEQ ID NO: 15 or the equivalent positions at SEQ ID NO: 6 (e.g. positions 15, 16, 22, 84, 95, and 126).

[0239] In some embodiments, the IL-2 mutein comprises a N29S mutation that corresponds to SEQ ID NO: 6. In some embodiments, the IL-2 mutein comprises a Y31S or a Y31H mutation that corresponds to SEQ ID NO: 6. In some embodiments, the IL-2 mutein comprises a K35R mutation that corresponds to SEQ ID NO: 6. In some embodiments, the IL-2 mutein comprises a T37A mutation that corresponds to SEQ ID NO: 6. In some embodiments, the IL-2 mutein comprises a K48E mutation that corresponds to SEQ ID NO: 6. In some embodiments, the IL-2 mutein comprises a V69A mutation that corresponds to SEQ ID NO: 6. In some embodiments, the IL-2 mutein comprises a N71R mutation that corresponds to SEQ ID NO: 6. In some embodiments, the IL-2 mutein comprises a Q74P mutation that corresponds to SEQ ID NO: 6. In some embodiments, the IL-2 mutein comprises a N88D or a N88R mutation that corresponds to SEQ ID NO: 6. In some embodiments, the IL-2 mutein comprises a C125A or C125S mutation that corresponds to SEQ ID NO: 6. These substitutions can be used alone or in combination with one another. In some embodiments, the mutein comprises 1, 2, 3, 4, 5, 6, 7, or 8 of these mutations. In some embodiments, the mutein comprises each of these substitutions. In some embodiments, the mutein comprises a wild-type residue at one or more of positions 35, 36, 42, 104, 115, or 146 that correspond to SEQ ID NO: 15 or the equivalent positions at SEQ ID NO: 6 (e.g., positions 15, 16, 22, 84, 95, and 126).

[0240] For any of the IL-2 muteins described herein, in some embodiments, one or more of positions 35, 36, 42, 104, 115, or 146 that correspond to SEQ ID NO: 15 or the equivalent positions at SEQ ID NO: 6 (e.g., positions 15, 16, 22, 84, 95, or 126) are wild-type (e.g., are as shown in SEQ ID NOs: 6 or 15). In some embodiments, 2, 3, 4, 5, 6, or each of positions 35, 36, 42, 104, 115, or 146 that correspond to SEQ ID NO: 15 or the equivalent positions at SEQ ID NO: 6 (e.g., positions 15, 16, 22, 84, 95, and 126) are wild-type.

[0241] In some embodiments, the IL-2 mutein comprises a sequence of:

(SEQ ID NO: 16)
MYRMQLLSCIALSLALVTNSAPTSSSTKKTQLQLEHLLLDL
QMILNGISNHKNPRLARMLTFKFYMPEKATEIKHLQCLEEE
LKPLEEALRLAPSKNFHLRPRDLISDINVIVLELKGSETTFMC
EYADETATIVEFLNRWITFSQSIISTLT

[0242] In some embodiments, the IL-2 mutein comprises a sequence of:

(SEQ ID NO: 17)
MYRMQLLSCIALSLALVTNSAPTSSSTKKTQLQLEHLLLDL
QMILNGISNHKNPRLARMLTFKFYMPEKATELKHIQCLEEE
LKPLEEALRLAPSKNFHLRPRDLISDINVIVLELKGSETTFMC
EYADETATIVEFLNRWITFSQSIISTLT

[0243] In some embodiments, the IL-2 mutein comprises a sequence of:

(SEQ ID NO: 18)
MYRMQLLSCIALSLALVTNSAPTSSSTKKTQLQLEHLLLDL
QMILNGISNHKNPRLARMLTFKFYMPEKATELKHLQCLEEE
LKPLEEALRLAPSKNFHIRPRDLISDINVIVLELKGSETTFMC
EYADETATIVEFLNRWITFSQSIISTLT

[0244] In some embodiments, the IL-2 mutein comprises a sequence of:

(SEQ ID NO: 19)
MYRMQLLSCIALSLALVTNSAPTSSSTKKTQLQLEHLLLDL
QMILNGISNHKNPRLARMLTFKFYMPEKATELKHLQCLEEE
LKPLEEALRLAPSKNFHLRPRDLISDINVIVLELKGSETTFMC
EYADETATIVEFINRWITFSQSIISTLT

[0245] In some embodiments, the IL-2 mutein sequences described herein do not comprise the IL-2 leader sequence. The IL-2 leader sequence can be represented by the sequence of MYRMQLLSCIALSLALVTNS (SEQ ID NO: 20). Therefore, in some embodiments, the sequences illustrated above can also encompass peptides without the leader sequence. Although SEQ ID NOs; 16-20 are illustrated with only mutation at one of positions 73, 76, 100, or 138 that correspond to SEQ ID NO: 15 or positions at one or more of positions 53, 56, 80, or 118 that correspond to SEQ ID NO: 6, the peptides can comprises one, two, three or 4 of the mutations at these positions. In some embodiments, the substitution at each position is isoleucine or other type of conservative amino acid substitution. In some embodiments, the leucine at the recited positions are substituted with, independently, isoleucine, valine, methionine, or phenylalanine.

[0246] In some embodiments, the IL-2 mutein molecule is fused to a Fc Region or other linker region as described herein. Examples of such fusion proteins can be found in U.S. Pat. Nos. 9,580,486, 7,105,653, 9,616,105, 9,428,567, US2017/0051029, WO2016/164937, US2014/0286898A1, WO2014153111A2, WO2010/085495, WO2016014428A2, WO2016025385A1, US2017/0037102, and US2006/0269515, each of which are incorporated by reference in its entirety.

[0247] In some embodiments, the Fc region comprises what is known as the LALA mutation. Using the Kabat numbering of the Fc region, this would correspond to L247A, L248A, and G250A. In some embodiments, using the EU numbering of the Fc region, the Fc region comprises a L234A mutation, a L235A mutation, and/or a G237A mutation. Regardless of the numbering system used, in some embodiments, the Fc portion can comprise mutations that correspond to these residues. In some embodiments, the Fc region comprises N297G or N297A (Kabat numbering) mutations. The Kabat numbering is based upon a full-length sequence, but would be used in a fragment based upon a traditional alignment used by one of skill in the art for the Fc region.

[0248] In some embodiments, the Fc region comprises a sequence of:

(SEQ ID NO: 21)
DKTHTCPPCPAPEAAGAPSVFLFPPKPKDTLMISRTPEVTCV
VVDVSHEDPEVKFNWYVDGVEVHNAKTKPREEQYNSTYR
VVSVLTVLHQDWLNGKEYKCKVSNKALPAPIEKTISKAKG
QPREPQVYTLPPSREEMTKNQVSLTCLVKGFYPSDIAVEWE
SNGQPENNYKTTPPVLDSDGSFFLYSKLTVDKSRWQQGNV
FSCSVMHEALHNHYTQKSLSLSPG.
or
(SEQ ID NO: 28)
DKTHTCPPCPAPELLGGPSVFLFPPKPKDTLMISRTPEVTCV
VVDVSHEDPEVKFNWYVDGVEVHNAKTKPREEQYNSTYR
VVSVLTVLHQDWLNGKEYKCKVSNKALPAPIEKTISKAKG
QPREPQVYTLPPSREEMTKNQVSLTCLVKGFYPSDIAVEWE
SNGQPENNYKTTPPVLDSDGSFFLYSKLTVDKSRWQQGNV
FSCSVMHEALHNHYTQKSLSLSPG.

[0249] In some embodiments, the IL-2 mutein is linked to the Fc region. Non-limiting examples of linkers are glycine/serine linkers. For example, a glycine/serine linkers can be a sequence of GGGGSGGGGSGGGGSGGGGS (SEQ ID NO: 22) or GGGGSGGGGSGGGGS (SEQ ID NO: 30). This is simply a non-limiting example and the linker can have varying number of GGGGS (SEQ ID NO: 23) or GGGGA repeats (SEQ ID NO: 29). In some embodiments, the linker comprises 1, 2, 3, 4, 5, 6, 7, 8, 9, or 10 of the GGGGS (SEQ ID NO: 23) or GGGGA repeats (SEQ ID NO: 29) repeats. In some embodiments, the linker is 10 amino acids in length. In some embodiments, the linker is 5 amino acids in length. In some embodiments, the linker is 15 amino acids in length. In some embodiments, the linker is 20 amino acids in length. In some embodiments, the linker is 25 amino acids in length. In some embodiments, the linker is 30 amino acids in length. In some embodiments, the linker is 35 amino acids in length. In some embodiments, the linker is from 5-50 amino acids in length.

[0250] Thus, the IL-2/Fc fusion can be represented by the formula of Z_{IL-2M}-L_{gs}-Z_{Fc}, wherein Z_{IL-2M} is a IL-2 mutein as described herein, L_{gs} is a linker sequence as described herein (e.g., glycine/serine linker) and Z_{Fc} is a Fc region described herein or known to one of skill in the art. In some embodiments, the formula can be in the reverse orientation Z_{Fc}-L_{gs}-Z_{IL-2M}.

[0251] In some embodiments, the IL-2/Fc fusion comprises a sequence of

(SEQ ID NO: 24)
MYRMQLLSCIALSLALVTNSAPTSSSTKKTQLQLEHLLLDL
QMILNGISNHKNPRLARMLTFKFYMPEKATEIKHLQCLEEE
LKPLEEALRLAPSKNFHLRPRDLISDINVIVLELKGSETTFMC
EYADETATIVEFLNRWITFSQSIISTLTGGGGSGGGGSGGGG
SGGGGSDKTHTCPPCPAPEAAGAPSVFLFPPKPKDTLMISRT
PEVTCVVVDVSHEDPEVKFNWYVDGVEVHNAKTKPREEQ
YNSTYRVVSVLTVLHQDWLNGKEYKCKVSNKALPAPIEKT
ISKAKGQPREPQVYTLPPSREEMTKNQVSLTCLVKGFYPSDI
AVEWESNGQPENNYKTTPPVLDSDGSFFLYSKLTVDKSRW
QQGNVFSCSVMHEALHNHYTQKSLSLSPG
(SEQ ID NO: 25)
MYRMQLLSCIALSLALVTNSAPTSSSTKKTQLQLEHLLLDL
QMILNGISNHKNPRLARMLTFKFYMPEKATELKHIQCLEEE
LKPLEEALRLAPSKNFHLRPRDLISDINVIVLELKGSETTFMC
EYADETATIVEFLNRWITFSQSIISTLTGGGGSGGGGSGGGG
SGGGGSDKTHTCPPCPAPEAAGAPSVFLFPPKPKDTLMISRT
PEVTCVVVDVSHEDPEVKFNWYVDGVEVHNAKTKPREEQ
YNSTYRVVSVLTVLHQDWLNGKEYKCKVSNKALPAPIEKT
ISKAKGQPREPQVYTLPPSREEMTKNQVSLTCLVKGFYPSDI
AVEWESNGQPENNYKTTPPVLDSDGSFFLYSKLTVDKSRW
QQGNVFSCSVMHEALHNHYTQKSLSLSPG
(SEQ ID NO: 26)
MYRMQLLSCIALSLALVTNSAPTSSSTKKTQLQLEHLLLDL
QMILNGISNHKNPRLARMLTFKFYMPEKATELKHLQCLEEE
LKPLEEALRLAPSKNFHIRPRDLISDINVIVLELKGSETTFMC
EYADETATIVEFLNRWITFSQSIISTLTGGGGSGGGGSGGGG
SGGGGSDKTHTCPPCPAPEAAGAPSVFLFPPKPKDTLMISRT
PEVTCVVVDVSHEDPEVKFNWYVDGVEVHNAKTKPREEQ
YNSTYRVVSVLTVLHQDWLNGKEYKCKVSNKALPAPIEKT
ISKAKGQPREPQVYTLPPSREEMTKNQVSLTCLVKGFYPSDI
AVEWESNGQPENNYKTTPPVLDSDGSFFLYSKLTVDKSRW
QQGNVFSCSVMHEALHNHYTQKSLSLSPG
(SEQ ID NO: 27)
MYRMQLLSCIALSLALVTNSAPTSSSTKKTQLQLEHLLLDL
QMILNGISNHKNPRLARMLTFKFYMPEKATELKHLQCLEEE
LKPLEEALRLAPSKNFHLRPRDLISDINVIVLELKGSETTFMC
EYADETATIVEFINRWITFSQSIISTLTGGGGSGGGGSGGGGS
GGGGSDKTHTCPPCPAPEAAGAPSVFLFPPKPKDTLMISRTP
EVTCVVVDVSHEDPEVKFNWYVDGVEVHNAKTKPREEQY
NSTYRVVSVLTVLHQDWLNGKEYKCKVSNKALPAPIEKTIS
KAKGQPREPQVYTLPPSREEMTKNQVSLTCLVKGFYPSDIA
VEWESNGQPENNYKTTPPVLDSDGSFFLYSKLTVDKSRWQ
QGNVFSCSVMHEALHNHYTQKSLSLSPG.

[0252] In some embodiments, the IL-2/Fc fusion comprises a sequence selected from the following table, Table 2:

TABLE 2
IL-2/Fc Fusion Protein Amino Acid Sequences

| Sequence | |
|---|---|
| Identification | Sequence |
| SEQ ID NO: 7 | APTSSSTKKTQLQLEHLLLDLQMILNGINNYKNPKLTRMLTFKFYMPKKATELKHLQCLEE |
| | ELKPLEEVLNLAQSKNFHLRPRDLISRINVIVLELKGSETTFMCEYADETATIVEFLNRWI |
| | TFSQSIISTLTGGGGAGGGGDKTHTCPPCPAPELLGGPSVFLFPPKPKDTLMISRTPEVTC |
| | VVVDVSHEDPEVKFNWYVDGVEVHNAKTKPREEQYASTYRVVSVLTVLHQDWLNGKEYKCK |
| | VSNKALPAPIEKTISKAKGQPREPQVYTLPPSRDELTKNQVSLTCLVKGFYPSDIAVEWES |
| | NGQPENNYKTTPPVLDSDGSFFLYSKLTVDKSRWQQGNVFSCSVMHEALHNHYTQKSLSLS |
| | PGK |
| SEQ ID NO: 8 | APTSSSTKKTQLQLEHLLLHLQMILNGINNYKNPKLTRMLTFKFYMPKKATELKHLQCLEE |
| | ELKPLEEVLNLAQSKNFHLRPRDLISNINVIVLELKGSETTFMCEYADETATIVEFLNRWI |
| | TFSQSIISTLTVECPPCPAPPVAGPSVFLFPPKPKDTLMISRTPEVTCVVVDVSHEDPEVQ |
| | FNWYVDGVEVHNAKTKPREEQFNSTFRVVSVLTVVHQDWLNGKEYKCKVSNKGLPAPIEKT |
| | ISKTKGQPREPQVYTLPPSREEMTKNQVSLTCLVKGFYPSDIAVEWESNGQPENNYKTTPP |
| | MLDSDGSFFLYSKLTVDKSRWQQGNVFSCSVMHEALHNHYTQKSLSLSPGK |
| SEQ ID NO: 9 | APTSSSTKKTQLQLEHLLLDLQMILNGINNYKNPKLTRMLTFKFYMPKKATELKHLQCLEE |
| | ELKPLEEVLNLAQSKNFHLRPRDLISRINVIVLELKGSETTFMCEYADETATIVEFLNRWI |
| | TFSQSIISTLTDKTHTCPPCPAPELLGGPSVFLFPPKPKDTLMISRTPEVTCVVVDVSHED |
| | PEVKFNWYVDGVEVHNAKTKPREEQYASTYRVVSVLTVLHQDWLNGKEYKCKVSNKALPAP |
| | IEKTISKAKGQPREPQVYTLPPSRDELTKNQVSLTCLVKGFYPSDIAVEWESNGQPENNYK |
| | TTPPVLDSDGSFFLYSKLTVDKSRWQQGNVFSCSVMHEALHNHYTQKSLSLSPG |
| SEQ ID NO: 10 | APTSSSTKKTQLQLEHLLLDLQMILNGINNYKNPKLTRMLTFKFYMPKKATELKHLQCLEE |
| | ELKPLEEVLNLAQSKNFHLRPRDLISRINVIVLELKGSETTFMCEYADETATIVEFLNRWI |
| | TFSQSIISTLTGGGGSDKTHTCPPCPAPELLGGPSVFLFPPKPKDTLMISRTPEVTCVVVD |
| | VSHEDPEVKFNWYVDGVEVHNAKTKPREEQYASTYRVVSVLTVLHQDWLNGKEYKCKVSNK |
| | ALPAPIEKTISKAKGQPREPQVYTLPPSRDELTKNQVSLTCLVKGFYPSDIAVEWESNGQP |
| | ENNYKTTPPVLDSDGSFFLYSKLTVDKSRWQQGNVFSCSVMHEALHNHYTQKSLSLSPG |
| SEQ ID NO: 11 | APTSSSTKKTQLQLEHLLLDLQMILNGINNYKNPKLTRMLTFKFYMPKKATELKHLQCLEE |
| | ELKPLEEVLNLAQSKNFHLRPRDLISRINVIVLELKGSETTFMCEYADETATIVEFLNRWI |
| | TFSQSIISTLTGGGGSGGGGSDKTHTCPPCPAPELLGGPSVFLFPPKPKDTLMISRTPEVT |
| | CVVVDVSHEDPEVKFNWYVDGVEVHNAKTKPREEQYASTYRVVSVLTVLHQDWLNGKEYKC |
| | KVSNKALPAPIEKTISKAKGQPREPQVYTLPPSRDELTKNQVSLTCLVKGFYPSDIAVEWE |
| | SNGQPENNYKTTPPVLDSDGSFFLYSKLTVDKSRWQQGNVFSCSVMHEALHNHYTQKSLSL |
| | SPG |
| SEQ ID NO: 12 | APTSSSTKKTQLQLEHLLLDLQMILNGINNYKNPKLTRMLTFKFYMPKKATELKHLQCLEE |
| | ELKPLEEVLNLAQSKNFHLRPRDLISRINVIVLELKGSETTFMCEYADETATIVEFLNRWI |
| | TFSQSIISTLTGGGGSGGGGSGGGGSDKTHTCPPCPAPELLGGPSVFLFPPKPKDTLMISR |
| | TPEVTCVVVDVSHEDPEVKFNWYVDGVEVHNAKTKPREEQYASTYRVVSVLTVLHQDWLNG |
| | KEYKCKVSNKALPAPIEKTISKAKGQPREPQVYTLPPSRDELTKNQVSLTCLVKGFYPSDI |
| | AVEWESNGQPENNYKTTPPVLDSDGSFFLYSKLTVDKSRWQQGNVFSCSVMHEALHNYHTQ |
| | KSLSLSPG |
| SEQ ID NO: 13 | APTSSSTKKTQLQLEHLLLDLQMILNGINNYKNPKLTRMLTFKFYMPKKATELKHLQCLEE |
| | ELKPLEEVLNLAQSKNFHLRPRDLISRINVIVLELKGSETTFMCEYADETATIVEFLNRWI |
| | TFSQSIISTLTGGGGSGGGGSGGGGSGGGGSDKTHTCPPCPAPELLGGPSVFLFPPKPKDT |
| | LMISRTPEVTCVVVDVSHEDPEVKFNWYVDGVEVHNAKTKPREEQYASTYRVVSVLTVLHQ |
| | DWLNGKEYKCKVSNKALPAPIEKTISKAKGQPREPQVYTLPPSRDELTKNQVSLTCLVKGF |
| | YPSDIAVEWESNGQPENNYKTTPPVLDSDGSFFLYSKLTVDKSRWQQGNVFSCSVMHEALH |
| | NHYTQKSLSLSPG |
| SEQ ID NO: 14 | APTSSSTKKTQLQLEHLLLHLQMILNGINNYKNPKLTRMLTFKFYMPKKATELKHLQCLEE |
| | ELKPLEEVLNLAQSKNFHLRPRDLISNINVIVLELKGSETTFMCEYADETATIVEFLNRWI |
| | TFSQSIISTLTGGGGSGGGGSGGGGSDKTHTCPPCPAPELLGGPSVFLFPPKPKDTLMISR |
| | TPEVTCVVVDVSHEDPEVKFNWYVDGVEVHNAKTKPREEQYASTYPVVSVLTVLHQDWLNG |
| | KEYKCKVSNKALPAPIEKTISKAKGQPREPQVYTLPPSRDELTKNQVSLTCLVKGFYPSDI |
| | AVEWESNGQPENNYKTTPPVLDSDGSFFLYSKLTVDKSRWQQGNVFSCSVMHEALHNHYTQ |
| | KSLSLSPG |

[0253] In some embodiments, the IL-2 muteins comprises one or more of the sequences provided in the following table, which, in some embodiments, shows the IL-2 mutein fused with other proteins or linkers. The table also provides sequences for a variety of Fc domains or variants that the IL-2 can be fused with:

| SEQ | | |
|---|---|---|
| ID | Brief | |
| NO: | Description | Amino Acid Sequence |
| 31 | Human IL-2 | APTSSSTKKTQLQLEHLLLDLQMILNGINNYKNPKLTRMLTFKFYMPKKA |
| | with C125S | TELKHLQCLEEELKPLEEVLNLAQSKNFHLRPRDLISNINVIVLELKGSE |
| | mutation | TTFMCEYADETATIVEFLNRWITFSQSIISTLT |
| 32 | Human IL-2 | APASSSTKKTQLQLEHLLLDLQMILNGINNYKNPKLTRMLTFKFYMPKKA |
| | with C125S | TELKHLQCLEEELKPLEEVLNLAQSKNFHLRPRDLISNINVIVLELKGSE |
| | and T3A | TTFMCEYADETATIVEFLNRWITFSQSIISTLT |
| | mutations | |
| 33 | Human IL-2 | APTSSSTKKTQLQLEHLLLDLQMILNGINNYKNPKLTRMLTFKFYMPKKA |
| | with N88R | TELKHLQCLEEELKPLEEVLNLAQSKNFHLRPRDLISRINVIVLELKGSE |
| | and | TTFMCEYADETATIVEFLNRWITFSQSIISTLT |
| | C125S | |
| 34 | Human IL-2 | APTSSSTKKTQLQLEHLLLDLQMILNGINNYKNPKLTRMLTFKFYMPKKA |
| | with V69A, | TELKHLQCLEEELKPLEEALNLAPSKNFHLRPRDLISNINVIVLELKGSE |
| | Q74P and | TTFMCEYADETATIVEFLNRWITFSQSIISTLT |
| | C125S | |
| | mutations | |
| 35 | Human IL-2 | APTSSSTKKTQLQLEHLLLDLQMILNGINNYKNPKLTRMLTFKFYMPKKA |
| | with V69A, | TELKHLQCLEEELKPLEEALNLAPSKNFHLRPRDLISDINVIVLELKGSE |
| | Q74P, N88D | TTFMCEYADETATIVEFLNRWITFSQSIISTLT |
| | and C125S | |
| | mutations | |
| 36 | Human IL-2 | APTSSSTKKTQLQLEHLLLDLQMILNGINNYKNPKLTRMLTFKFYMPKKA |
| | with V69A, | TELKHLQCLEEELKPLEEALNLAPSKNFHLRPRDLISRINVIVLELKGSE |
| | Q74P, N88R | TTFMCEYADETATIVEFLNRWITFSQSIISTLT |
| | and C125S | |
| | mutations | |
| 37 | Human IL-2 | APTSSSTKKTQLQLEHLLLDLQMILNGINNYKNPKLTRMLTFKFYMPKKA |
| | with N88D | TELKHLQCLEEELKPLEEVLNLAQSKNFHLRPRDLISDINVIVLELKGSE |
| | and | TTFMCEYADETATIVEFLNRWITFSQSIISTLT |
| | C125S | |
| 38 | Human IL-2 | APTSSSTKKTQLQLEHLLLDLQMILNGINNYKNPKLTRMLTFKFYMPKKA |
| | with L53I, | TEIKHLQCLEEELKPLEEALNLAPSKNFHLRPRDLISDINVIVLELKGSE |
| | V69A, Q74P, | TTFMCEYADETATIVEFLNRWITFSQSIISTLT |
| | N88D and | |
| | C125S | |
| | mutations | |
| 39 | Human IL-2 | APTSSSTKKTQLQLEHLLLDLQMILNGINNYKNPKLTRMLTFKFYMPKKA |
| | with L56I, | TELKHIQCLEEELKPLEEALNLAPSKNFHLRPRDLISDINVIVLELKGSE |
| | V69A, Q74P, | TTFMCEYADETATIVEFLNRWITFSQSIISTLT |
| | N88D and | |
| | C125S | |
| | mutations | |
| 40 | Human IL-2 | APTSSSTKKTQLQLEHLLLDLQMILNGINNYKNPKLTRMLTFKFYMPKKA |
| | with V69A, | TELKHLQCLEEELKPLEEALNLAPSKNFHIRPRDLISDINVIVLELKGSE |
| | Q74P, L80I, | TTFMCEYADETATIVEFLNRWITFSQSIISTLT |
| | N88D and | |
| | C125S | |
| | mutations | |
| 41 | Human IL-2 | APTSSSTKKTQLQLEHLLLDLQMILNGINNYKNPKLTRMLTFKFYMPKKA |
| | with V69A, | TELKHLQCLEEELKPLEEALNLAPSKNFHLRPRDLISDINVIVLELKGSE |
| | Q74P, N88D, | TTFMCEYADETATIVEFINRWITFSQSIISTLT |
| | L118I, and | |
| | C125S | |
| | mutations | |
| 21 | Human IgG1 Fc | DKTHTCPPCPAPEAAGAPSVFLFPPKPKDTLMISRTPEVTCVVVDVSHED |
| | (N-terminal | PEVKFNWYVDGVEVHNAKTKPREEQYNSTYRVVSVLTVLHQDWLNGKEYK |
| | fusions) with | CKVSNKALPAPIEKTISKAKGQPREPQVYTLPPSREEMTKNQVSLTCLVK |
| | L234A, L235A, | GFYPSDIAVEWESNGQPENNYKTTPPVLDSDGSFFLYSKLTVDKSRWQQG |
| | and G237A | NVFSCSVMHEALHNHYTQKSLSLSPG |
| | mutations | |
| 30 | GGGGSGGGGSGGG | GGGGSGGGGSGGGGS |
| | GS linker (15 | |
| | amino acids) | |
| 22 | GGGGSGGGGSGGG | GGGGSGGGGSGGGGSGGGGS |
| | GSGGGGS | |
| | linker (20 | |
| | amino acids) | |
| 23 | GGGGS linker | GGGGS |
| | (5 amino | |
| | acids) | |
| 43 | Human IgG1 Fc | DKTHTCPPCPAPELLGGPSVFLFPPKPKDTLMISRTPEVTCVVVDVSHED |
| | (truncated) | PEVKFNWYVDGVEVHNAKTKPREEQYGSTYRVVSVLTVLHQDWLNGKEYK |
| | with N297G | CKVSNKALPAPIEKTISKAKGQPREPQVYTLPPSREEMTKNQVSLTCLVK |
| | mutation | GFYPSDIAVEWESNGQPENNYKTTPPVLDSDGSFFLYSKLTVDKSRWQQG |
| | | NVFSCSVMHEALHNHYTQKSLSLSPG |
| 44 | Antibody | ASTKGPSVFPLAPSSKSTSGGTAALGCLVKDYFPEPVTVSWNSGALTSGV |
| | Heavy Chain | HTFPAVLQSSGLYSLSSVVTVPSSSLGTQTYICNVNHKPSNTKVDKKVEP |
| | CH1-CH2-CH3 | KSCDKTHTCPPCPAPEAAGAPSVFLFPPKPKDTLMISRTPEVTCVVVDVS |
| | domains | HEDPEVKFNWYVDGVEVHNAKTKPREEQYNSTYRVVSVLTVLHQDWLNGK |
| | (human IgG1 | EYKCKVSNKALPAPIEKTISKAKGQPREPQVYTLPPSREEMTKNQVSLTC |
| | with L234A, | LVKGFYPSDIAVEWESNGQPENNYKTTPPVLDSDGSFFLYSKLTVDKSRW |
| | L235A, and | QQGNVFSCSVMHEALHNHYTQKSLSLSPG |
| | G237A) | |
| 45 | Antibody | RTVAAPSVFIFPPSDEQLKSGTASVVCLLNNFYPREAKVQWKVDNALQSG |
| | Kappa | NSQESVTEQDSKDSTYSLSSTLTLSKADYEKHKVYACEVTHQGLSSPVTK |
| | Constant | SFNRGEC |
| | Domain | |
| | (human) | |
| 46 | IL-2-G4Sx3-Fc | APTSSSTKKTQLQLEHLLLDLQMILNGINNYKNPKLTRMLTFKFYMPKKA |
| | | TELKHLQCLEEELKPLEEVLNLAQSKNFHLRPRDLISNINVIVLELKGSE |
| | | TTFMCEYADETATIVEFLNRWITFSQSIISTLTGGGGSGGGGSGGGGSDK |
| | | THTCPPCPAPEAAGAPSVFLFPPKPKDTLMISRTPEVTCVVVDVSHEDPE |
| | | VKFNWYVDGVEVHNAKTKPREEQYNSTYRVVSVLTVLHQDWLNGKEYKCK |
| | | VSNKALPAPIEKTISKAKGQPREPQVYTLPPSREEMTKNQVSLTCLVKGF |
| | | YPSDIAVEWESNGQPENNYKTTPPVLDSDGSFFLYSKLTVDKSRWQQGNV |
| | | FSCSVMHEALHNHYTQKSLSLSPG |
| 47 | IL-2 T3A- | APASSSTKKTQLQLEHLLLDLQMILNGINNYKNPKLTRMLTFKFYMPKKA |
| | G4Sx3-Fc | TELKHLQCLEEELKPLEEVLNLAQSKNFHLRPRDLISNINVIVLELKGSE |
| | | TTFMCEYADETATIVEFLNRWITFSQSIISTLTGGGGSGGGGSGGGGSDK |
| | | THTCPPCPAPEAAGAPSVFLFPPKPKDTLMISRTPEVTCVVVDVSHEDPE |
| | | VKFNWYVDGVEVHNAKTKPREEQYNSTYRVVSVLTVLHQDWLNGKEYKCK |
| | | VSNKALPAPIEKTISKAKGQPREPQVYTLPPSREEMTKNQVSLTCLVKGF |
| | | YPSDIAVEWESNGQPENNYKTTPPVLDSDGSFFLYSKLTVDKSRWQQGNV |
| | | FSCSVMHEALHNHYTQKSLSLSPG |
| 48 | IL-2 N88R- | APTSSSTKKTQLQLEHLLLDLQMILNGINNYKNPKLTRMLTFKFYMPKKA |
| | G4Sx3-Fc | TELKHLQCLEEELKPLEEVLNLAQSKNFHLRPRDLISRINVIVLELKGSE |
| | | TTFMCEYADETATIVEFLNRWITFSQSIISTLTGGGGSGGGGSGGGGSDK |
| | | THTCPPCPAPEAAGAPSVFLFPPKPKDTLMISRTPEVTCVVVDVSHEDPE |
| | | VKFNWYVDGVEVHNAKTKPREEQYNSTYRVVSVLTVLHQDWLNGKEYKCK |
| | | VSNKALPAPIEKTISKAKGQPREPQVYTLPPSREEMTKNQVSLTCLVKGF |
| | | YPSDIAVEWESNGQPENNYKTTPPVLDSDGSFFLYSKLTVDKSRWQQGNV |
| | | FSCSVMHEALHNHYTQKSLSLSPG |
| 49 | IL-2 V69A, | APTSSSTKKTQLQLEHLLLDLQMILNGINNYKNPKLTRMLTFKFYMPKKA |
| | Q74P, | TELKHLQCLEEELKPLEEALNLAPSKNFHLRPRDLISNINVIVLELKGSE |
| | -G4Sx3- | TTFMCEYADETATIVEFLNRWITFSQSIISTLTGGGGSGGGGSGGGGSDK |
| | Fc | THTCPPCPAPEAAGAPSVFLFPPKPKDTLMISRTPEVTCVVVDVSHEDPE |
| | | VKFNWYVDGVEVHNAKTKPREEQYNSTYRVVSVLTVLHQDWLNGKEYKCK |
| | | VSNKALPAPIEKTISKAKGQPREPQVYTLPPSREEMTKNQVSLTCLVKGF |
| | | YPSDIAVEWESNGQPENNYKTTPPVLDSDGSFFLYSKLTVDKSRWQQGNV |
| | | FSCSVMHEALHNHYTQKSLSLSPG |
| 50 | IL-2 N88D | APTSSSTKKTQLQLEHLLLDLQMILNGINNYKNPKLTRMLTFKFYMPKKA |
| | V69A, | TELKHLQCLEEELKPLEEALNLAPSKNFHLRPRDLISDINVIVLELKGSE |
| | Q74P- | TTFMCEYADETATIVEFLNRWITFSQSIISTLTGGGGSGGGGSGGGGSDK |
| | G4Sx3-Fc | THTCPPCPAPEAAGAPSVFLFPPKPKDTLMISRTPEVTCVVVDVSHEDPE |
| | | VKFNWYVDGVEVHNAKTKPREEQYNSTYRVVSVLTVLHQDWLNGKEYKCK |
| | | VSNKALPAPIEKTISKAKGQPREPQVYTLPPSREEMTKNQVSLTCLVKGF |
| | | YPSDIAVEWESNGQPENNYKTTPPVLDSDGSFFLYSKLTVDKSRWQQGNV |
| | | FSCSVMHEALHNHYTQKSLSLSPG |
| 51 | IL-2 N88R | APTSSSTKKTQLQLEHLLLDLQMILNGINNYKNPKLTRMLTFKFYMPKKA |
| | V69A, | TELKHLQCLEEELKPLEEALNLAPSKNFHLRPRDLISRINVIVLELKGSE |
| | Q74P- | TTFMCEYADETATIVEFLNRWITFSQSIISTLTGGGGSGGGGSGGGGSDK |
| | G4Sx3-Fc | THTCPPCPAPEAAGAPSVFLFPPKPKDTLMISRTPEVTCVVVDVSHEDPE |
| | | VKFNWYVDGVEVHNAKTKPREEQYNSTYRVVSVLTVLHQDWLNGKEYKCK |
| | | VSNKALPAPIEKTISKAKGQPREPQVYTLPPSREEMTKNQVSLTCLVKGF |
| | | YPSDIAVEWESNGQPENNYKTTPPVLDSDGSFFLYSKLTVDKSRWQQGNV |
| | | FSCSVMHEALHNHYTQKSLSLSPG |
| 52 | IL-2 N88D- | APTSSSTKKTQLQLEHLLLDLQMILNGINNYKNPKLTRMLTFKFYMPKKA |
| | G4Sx3-Fc | TELKHLQCLEEELKPLEEVLNLAQSKNFHLRPRDLISDINVIVLELKGSE |
| | | TTFMCEYADETATIVEFLNRWITFSQSIISTLTGGGGSGGGGSGGGGSDK |
| | | THTCPPCPAPEAAGAPSVFLFPPKPKDTLMISRTPEVTCVVVDVSHEDPE |
| | | VKFNWYVDGVEVHNAKTKPREEQYNSTYRVVSVLTVLHQDWLNGKEYKCK |
| | | VSNKALPAPIEKTISKAKGQPREPQVYTLPPSREEMTKNQVSLTCLVKGF |
| | | YPSDIAVEWESNGQPENNYKTTPPVLDSDGSFFLYSKLTVDKSRWQQGNV |
| | | FSCSVMHEALHNHYTQKSLSLSPG |
| 53 | IL-2 L53I | APTSSSTKKTQLQLEHLLLDLQMILNGINNYKNPKLTRMLTFKFYMPKKA |
| | N88D V69A, | TEIKHLQCLEEELKPLEEALNLAPSKNFHLRPRDLISDINVIVLELKGSE |
| | Q74P, | TTFMCEYADETATIVEFLNRWITFSQSIISTLTGGGGSGGGGSGGGGSGG |
| | C125S- | GGSDKTHTCPPCPAPEAAGAPSVFLFPPKPKDTLMISRTPEVTCVVVDVS |
| | G4Sx4-Fc | HEDPEVKFNWYVDGVEVHNAKTKPREEQYNSTYRVVSVLTVLHQDWLNGK |
| | | EYKCKVSNKALPAPIEKTISKAKGQPREPQVYTLPPSREEMTKNQVSLTC |
| | | LVKGFYPSDIAVEWESNGQPENNYKTTPPVLDSDGSFFLYSKLTVDKSRW |
| | | QQGNVFSCSVMHEALHNHYTQKSLSLSPG |
| 54 | IL-2 L56I | APTSSSTKKTQLQLEHLLLDLQMILNGINNYKNPKLTRMLTFKFYMPKKA |
| | N88D V69A, | TELKHIQCLEEELKPLEEALNLAPSKNFHLRPRDLISDINVIVLELKGSE |
| | Q74P, C125S- | TTFMCEYADETATIVEFLNRWITFSQSIISTLTGGGGSGGGGSGGGGSGG |
| | G4Sx4-Fc | GGSDKTHTCPPCPAPEAAGAPSVFLFPPKPKDTLMISRTPEVTCVVVDVS |
| | | HEDPEVKFNWYVDGVEVHNAKTKPREEQYNSTYRVVSVLTVLHQDWLNGK |
| | | EYKCKVSNKALPAPIEKTISKAKGQPREPQVYTLPPSREEMTKNQVSLTC |
| | | LVKGFYPSDIAVEWESNGQPENNYKTTPPVLDSDGSFFLYSKLTVDKSRW |
| | | QQGNVFSCSVMHEALHNHYTQKSLSLSPG |
| 55 | IL-2 L80I | APTSSSTKKTQLQLEHLLLDLQMILNGINNYKNPKLTRMLTFKFYMPKKA |
| | N88D V6 9A, | TELKHLQCLEEELKPLEEALNLAPSKNFHIRPRDLISDINVIVLELKGSE |
| | C125S Q74P- | TTFMCEYADETATIVEFLNRWITFSQSIISTLTGGGGSGGGGSGGGGSGG |
| | G4Sx4-Fc | GGSDKTHTCPPCPAPEAAGAPSVFLFPPKPKDTLMISRTPEVTCVVVDVS |
| | | HEDPEVKFNWYVDGVEVHNAKTKPREEQYNSTYRVVSVLTVLHQDWLNGK |
| | | EYKCKVSNKALPAPIEKTISKAKGQPREPQVYTLPPSREEMTKNQVSLTC |
| | | LVKGFYPSDIAVEWESNGQPENNYKTTPPVLDSDGSFFLYSKLTVDKSRW |
| | | QQGNVFSCSVMHEALHNHYTQKSLSLSPG |
| 56 | IL-2 L118I | APTSSSTKKTQLQLEHLLLDLQMILNGINNYKNPKLTRMLTFKFYMPKKA |
| | N88D V69A, | TELKHLQCLEEELKPLEEALNLAPSKNFHLRPRDLISDINVIVLELKGSE |
| | Q74P, C125S- | TTFMCEYADETATIVEFINRWITFSQSIISTLTGGGGSGGGGSGGGGSGG |
| | G4Sx4-Fc | GGSDKTHTCPPCPAPEAAGAPSVFLFPPKPKDTLMISRTPEVTCVVVDVS |
| | | HEDPEVKFNWYVDGVEVHNAKTKPREEQYNSTYRVVSVLTVLHQDWLNGK |
| | | EYKCKVSNKALPAPIEKTISKAKGQPREPQVYTLPPSREEMTKNQVSLTC |
| | | LVKGFYPSDIAVEWESNGQPENNYKTTPPVLDSDGSFFLYSKLTVDKSRW |
| | | QQGNVFSCSVMHEALHNHYTQKSLSLSPG |
| 57 | IL-2 N88D | APTSSSTKKTQLQLEHLLLDLQMILNGINNYKNPKLTRMLTFKFYMPKKA |
| | V69A, Q74P- | TELKHLQCLEEELKPLEEALNLAPSKNFHLRPRDLISDINVIVLELKGSE |
| | G4Sx4-Fc | TTFMCEYADETATIVEFLNRWITFSQSIISTLTGGGGSGGGGSGGGGSGG |
| | | GGSDKTHTCPPCPAPEAAGAPSVFLFPPKPKDTLMISRTPEVTCVVVDVS |
| | | HEDPEVKFNWYVDGVEVHNAKTKPREEQYNSTYRVVSVLTVLHQDWLNGK |
| | | EYKCKVSNKALPAPIEKTISKAKGQPREPQVYTLPPSREEMTKNQVSLTC |
| | | LVKGFYPSDIAVEWESNGQPENNYKTTPPVLDSDGSFFLYSKLTVDKSRW |
| | | QQGNVFSCSVMHEALHNHYTQKSLSLSPG |
| 58 | FC-G4S-IL-2 | DKTHTCPPCPAPELLGGPSVFLFPPKPKDTLMISRTPEVTCVVVDVSHED |
| | N88D V69A, | PEVKFNWYVDGVEVHNAKTKPREEQYGSTYRVVSVLTVLHQDWLNGKEYK |
| | Q74P | CKVSNKALPAPIEKTISKAKGQPREPQVYTLPPSREEMTKNQVSLTCLVK |
| | | GFYPSDIAVEWESNGQPENNYKTTPPVLDSDGSFFLYSKLTVDKSRWQQG |
| | | NVFSCSVMHEALHNHYTQKSLSLSPGGGGGSAPTSSSTKKTQLQLEHLLL |
| | | DLQMILNGINNYKNPKLTRMLTFKFYMPKKATELKHLQCLEEELKPLEEA |
| | | LNLAPSKNFHLRPRDLISDINVIVLELKGSETTFMCEYADETATIVEFLN |
| | | RWITFAQSIISTLT |
| 59 | IL-2 N88D | APTSSSTKKTQLQLEHLLLDLQMILNGINNYKNPKLTRMLTFKFYMPKKA |
| | V69A, Q74P, | TEX₁KHX₂QCLEEELKPLEEALNLAPSKNFHX₃RPRDLISDINVIVLELKG |
| | C125S-G4SX4- | SETTFMCEYADETATIVEFX₄NRWITFSQSIISTLTGGGGSGGGGSGGGGS |
| | Fc, wherein | GGGGSDKTHTCPPCPAPEAAGAPSVFLFPPKPKDTLMISRTPEVTCVVVD |
| | at least one | VSHEDPEVKFNWYVDGVEVHNAKTKPREEQYNSTYRVVSVLTVLHQDWLN |
| | of X₁, X₂, X₃, | GKEYKCKVSNKALPAPIEKTISKAKGQPREPQVYTLPPSREEMTKNQVSL |
| | and X₄ is I | TCLVKGFYPSDIAVEWESNGQPENNYKTTPPVLDSDGSFFLYSKLTVDKS |
| | and the | RWQQGNVFSCSVMHEALHNHYTQKSLSLSPG |
| | remainder are | |
| | L or I. | |
| 60 | IL-2 N88D | APTSSSTKKTQLQLEHLLLDLQMILNGINNYKNPKLTRMLTFKFYMPKKA |
| | V69A, Q74P, | TEX₁KHX₂QCLEEELKPLEEALNLAPSKNFHX₃RPRDLISDINVIVLELKG |
| | C125S, | SETTFMCEYADETATIVEFX₄NRWITFSQSIISTLT |
| | wherein at | |
| | least one of | |
| | X₁, X₂, X₃, | |
| | and X₄ is I | |
| | and the | |
| | remainder are | |
| | L or I. | |

[0254] In some embodiments, the sequences shown in the table or throughout comprise or do not comprise one or more mutations that correspond to positions L53, L56, L80, and L118. In some embodiments, the sequences shown in the table or throughout the present application comprise or do not comprise one or more mutations that correspond to positions L59I, L63I, I24L, L94I, L96I or L1321 or other substitutions at the same positions. In some embodiments, the mutation is leucine to isoleucine. In some embodiments, the mutein does not comprise another mutation other than as shown or described herein. In some embodiments, the peptide comprises a sequence of SEQ ID NO: 21, SEQ ID NO: 31, SEQ ID NO: 32, SEQ ID NO: 33, SEQ ID NO: 34, SEQ ID NO: 35, SEQ ID NO: 36, SEQ ID NO: 37, SEQ ID NO: 38, SEQ ID NO: 39, SEQ ID NO: 40, SEQ ID NO: 41, SEQ ID NO: 43, SEQ ID NO: 44, SEQ ID NO: 45, SEQ ID NO: 46, SEQ ID NO: 47, SEQ ID NO: 48, SEQ ID NO: 49, SEQ ID NO: 50, SEQ ID NO: 51, SEQ ID NO: 52, SEQ ID NO: 53, SEQ ID NO: 54, SEQ ID NO: 55, or SEQ ID NO: 56, SEQ ID NO: 57, SEQ ID NO: 58, SEQ ID NO: 59, or SEQ ID NO: 60.

[0255] In some embodiments, the protein comprises a IL-2 mutein as provided for herein. In some embodiments, a polypeptide is provided comprising SEQ ID NO: 59 or SEQ ID NO: 60, wherein at least one of X₁, X₂, X₃, and X₄ is I and the remainder are L or I. In some embodiments, X₁, X₂, and X₃ are L and X₄ is I. In some embodiments, X₁, X₂, and X₄ are L and X₃ is I. In some embodiments, X₂, X₃, and X₄ are L and X₁ is I. In some embodiments, X₁, X₃, and X₄ are L and X₂ is I. In some embodiments, X₁ and X₂ are L and X₃ and X₄ are I. In some embodiments, X₁ and X₃ are L and X₂ and X₄ are I. In some embodiments, X₁ and X₄ are L and X₂ and X₃ are I. In some embodiments, X₂ and X₃ are L and X₁ and X₄ are I. In some embodiments, X₂ and X₄ are L and X₁ and X₃ are I. In some embodiments, X₃ and X₄ are L and X₁ and X₂ are I. In some embodiments, X₁, X₂, and X₃ are L and X₄ is I. In some embodiments, X₂, X₃, and X₄ are L and X₁ is I. In some embodiments, X₁, X₃, and X₄ are L and X₂ is I. In some embodiments, X₁, X₂, and X₄ are L and X₃ is I.

[0256] In some embodiments, the Fc portion of the fusion is not included. In some embodiments, the peptide consists essentially of a IL-2 mutein provided for herein. In some embodiments, the protein is free of a Fc portion.

[0257] For illustrative purposes only, embodiments of IL-2 mutein fused with a Fc and with a targeting moiety are illustrated in FIG. 19.

[0258] In some embodiments, the IL-2 mutein is linked directly, or indirectly, to a PD-1 agonist.

[0259] The sequences are for illustrative purposes only and are not intended to be limiting. In some embodiments, the compound comprises an amino acid sequence of SEQ ID NO: 53, 54, 55, or 56. In some embodiments, the compound comprises an amino acid sequence of SEQ ID NO: 53, 54, 55, or 56 with or without a C125A or C125S mutation. In some embodiments, the residue at position 125 is C, S, or A. In some embodiments, the compound comprises an amino acid sequence of SEQ ID NO: 59 or SEQ ID NO: 60, wherein at least one of X₁, X₂, X₃, and X₄ is I and the remainder are L or I. In some embodiments, the protein comprises a IL-2 mutein as provided for herein. In some embodiments, a polypeptide is provided comprising SEQ ID NO: 59 or SEQ ID NO: 60, wherein at least one of X₁, X₂, X₃, and X₄ is I and the remainder are L or I. In some embodiments, X₁, X₂, and X₃ are L and X₄ is I. In some embodiments, X₁, X₂, and X₄ are L and X₃ is I. In some embodiments, X₂, X₃, and X₄ are L and X₁ is I. In some embodiments, X₁, X₃, and X₄ are L and X₂ is I. In some embodiments, X₁ and X₂ are L and X₃ and X₄ are I. In some embodiments, X₁ and X₃ are L and X₂ and X₄ are I. In some embodiments, X₁ and X₄ are L and X₂ and X₃ are I. In some embodiments, X₂ and X₃ are L and X₁ and X₄ are I. In some embodiments, X₂ and X₄ are L and X₁ and X₃ are I. In some embodiments, X₃ and X₄ are L and X₁ and X₂ are I. In some embodiments, X₁, X₂, and X₃ are L and X₄ is I. In some embodiments, X₂, X₃, and X₄ are L and X₁ is I. In some embodiments, X₁, X₃, and X₄ are L and X₂ is I. In some embodiments, X₁, X₂, and X₄ are L and X₃ is I.

[0260] Each of the proteins may also be considered to have the C125S and the LALA and/or G237A mutations as provided for herein. The C125 substitution can also be C125A as described throughout the present application.

[0261] In an embodiment, an IL-2 mutein molecule comprises at least 60, 70, 80, 85, 90, 95, or 97% sequence identity or homology with a naturally occurring human IL-2 molecule, e.g., a naturally occurring IL-2 sequence disclosed herein or those that incorporated by reference.

[0262] As described herein the IL-2 muteins can be part of a bispecific molecule with a tethering moiety, such as a MAdCAM antibody that will target the IL-2 mutein to a MAdCAM expressing cell. As described herein, the bispecific molecule can be produced from two polypeptide chains. In some embodiments, the following can be used:

Table of MAdCAM-IL-2 Mutein Bispecific Compounds

| | Chain 1 N-terminal to | | | | | |
|---|---|---|---|---|---|---|
| | C-terminal Molecule | | | | Chain 2 N-terminal to | |
| | Component Sequence IDs | | | | C-terminal Molecule | |
| | | Antibody | | | Component Sequence IDs | |
| | | Heavy | | | | Light |
| | | Chain | | C- | | Chain |
| | Antibody VH | CH1—CH2—CH3 | | terminal | Light Chain | CK |
| Detail | Domain | Domains | Linker 1 | Moiety | VK Domain | Domain |
| 1. Anti- | Rat Anti- | SEQ ID | SEQ ID | SEQ ID | Rat Anti- | SEQ ID |
| MAdCam-Fc- | MAdCam -VH1 | NO: 44 | NO: 23 | NO: 35 | MAdCam -VK1 | NO: 45 |
| IL-2 N88D | | | | | | |
| V69A, Q74P | | | | | | |
| 2. Anti- | Rat Anti- | SEQ ID | SEQ ID | SEQ ID | Rat Anti- | SEQ ID |
| MAdCam - | MAdCam-VH2 | NO: 44 | NO: 23 | NO: 35 | MAdCam -VK2 | NO: 45 |
| Fc-IL-2 | | | | | | |
| N88D V69A, | | | | | | |
| Q74P | | | | | | |
| 3. Anti- | Rat Anti- | SEQ ID | SEQ ID | SEQ ID | Rat Anti- | SEQ ID |
| MAdCam - | MAdCam -VH1 | NO: 44 | NO: 23 | NO: 41 | MAdCam -VK3 | NO: 45 |
| Fc-IL-2 | | | | | | |
| L118I N88D | | | | | | |
| V69A, Q74P | | | | | | |
| 4. TTJ2- | Human TTJ2- | SEQ ID | SEQ ID | SEQ ID | Human TTJ2- | SEQ ID |
| Fc-IL-2 | VH | NO: 44 | NO: 23 | NO: 41 | VK | NO: 45 |
| L118I N88D | | | | | | |
| V69A, Q74P | | | | | | |
| 5. anti | Anti-MAdCam | SEQ ID | SEQ ID | SEQ ID | Anti-MAdCam | SEQ ID |
| hu.MAdCAM- | Human VH3 | NO: 44 | NO: 23 | NO: 41 | Human VK3 | NO: 45 |
| Fc-IL-2 | | | | | | |
| L118I N88D | | | | | | |
| V69A, Q74P | | | | | | |
| 6. anti | Anti-MAdCam | SEQ ID | SEQ ID | SEQ ID | Anti-MAdCam | SEQ ID |
| hu.MAdCAM- | Human VH4 | NO: 44 | NO: 23 | NO: 41 | Human VK4 | NO: 45 |
| Fc-IL-2 | | | | | | |
| L118I N88D | | | | | | |
| V69A, Q74P | | | | | | |
| 7. anti | Anti-MAdCam | SEQ ID | SEQ ID | SEQ ID | Anti-MAdCam | SEQ ID |
| hu.MAdCAM- | Human VH5 | NO: 44 | NO: 23 | NO: 41 | Human VK5 | NO: 45 |
| Fc-IL-2 | | | | | | |
| L118I N88D | | | | | | |
| V69A, Q74P | | | | | | |

[0263] The proteins can be produced with or without a C125A or C125S mutation in the IL-2 mutein. Examples of IL-2 muteins that can be included are illustrated herein, such as, but not limited to, a sequence of SEQ ID NO: 59 or SEQ ID NO: 60.

[0264] In some embodiments, the constant kappa domain in any of the light chains can be replaced with a constant lambda domain.

[0265] GITR-Binders

[0266] GITR (CD357) is a cell surface marker present on Tregs. Blockade of the GITR-GITRL interaction maintains Treg function. In some embodiments, a therapeutic compound comprises an IIC binding entity that binds GITR-expressing Treg cells and a targeting moiety that targets the therapeutic compound to the target tissue of interest.

[0267] In some embodiments, a therapeutic compound comprises an anti-GITR antibody molecule, e.g., anti-GITR antibody molecule that inhibit binding of GITR to GITRL.

[0268] In some embodiments, a therapeutic compound comprises an anti-GITR antibody molecule, anti-GITR antibody molecule that inhibit binding of GITR to GITRL, and PD-1 agonist, IL-2 mutein molecule, or other effector described herein.

[0269] While not wishing to be bound by theory, it is believed that the therapeutic compound that comprises a GITR binder effects accumulation of GITR-expressing Tregs at the site targeted by the targeting moiety of the therapeutic compound, e.g., a transplant or site of organ injury.

[0270] Butyrophilins/Butyrophilin-Like Molecules

[0271] Effector binding/modulating moiety can comprise an agonistic BTNL2 molecule. While not wishing to be bound by theory, it is believed that agonistic BTNL2 molecules induce Treg cells.

[0272] An agonistic BTNL2 molecule as that term as used herein, refers to a polypeptide having sufficient BTNL2 sequence that, as part of a therapeutic compound, it induces Treg cells. In some embodiments, a BTNL2 molecule has at least 60, 70, 80, 90, 95, 99, or 100% sequence identity, or substantial sequence identity, with a naturally occurring butyrophilin.

[0273] In some embodiments, an effector binding/modulating moiety is an antagonistic BTNL8 molecule.

### Therapeutic Compounds Comprising an Sm Binding/Modulating Moiety: Manipulation of Local Microenvironment

[0274] A therapeutic compound can comprise an effector binding/modulating moiety that promotes an immunosuppressive local microenvironment, e.g., by providing in the proximity of the target, a substance that inhibits or minimizes attack by the immune system of the target, referred to herein a SM binding/modulating moiety.

[0275] In some embodiments, the SM binding/modulating moiety comprises a molecule that inhibits or minimizes attack by the immune system of the target (referred to herein as an SM binding/modulating moiety). In some embodiments, a therapeutic compound comprises an SM binding/modulating moiety that binds and accumulates a soluble substance, e.g., an endogenous or exogenous substance having immunosuppressive function. In some embodiments, a therapeutic compound comprises an SM binding/modulating moiety, e.g., a CD39 molecule or a CD73 molecule or alkaline phosphatase molecule, that binds, inhibits, sequesters, degrades or otherwise neutralizes a soluble substance, typically and endogenous soluble substance, e.g., ATP in the case of a CD39 molecule or alkaline phosphatase molecule, or AMP in the case of a CD73 molecule, that promotes immune attack. In some embodiments, a therapeutic compound comprises an SM binding/modulating moiety that comprises an immunesuppressive substance, e.g. a fragment of protein that is immunosuppressive.

[0276] Therapeutic Compounds Comprising an ICSM Binding/Modulating Moiety: Inhibition of Stimulation, e.g., Inhibition of Co-Stimulation of Immune Cells

[0277] A therapeutic compound can comprise an ICSM binding/modulating moiety that inhibits or antagonizes a stimulatory, e.g., costimulatory binding pair, e.g., OX40 and OX40L. The ICSM binding/modulating moiety can bind and antagonize either member of the pair.

[0278] In an embodiment, the ICSM binding/modulating moiety comprises an antibody molecule that binds and antagonizes either member of a stimulatory, e.g., costimulatory binding pair. In an embodiment the ICSM binding/modulating moiety comprises antagonistic analog of one of the members of the binding pair. In such embodiments the ICSM binding/modulating moiety can comprise a soluble fragment of one of the members that binds the other. Typically the analog will have at least 50, 60, 70, 80, 90, 95, or 98% homology or sequence identity with a naturally occurring member that binds the target member of the pair. In the case of an ICSM binding/modulating moiety that binds the member present on the surface of an immune cell, the ICSM binding/modulating moiety typically binds but does not activate, or allow endogenous counter member to bind and activate.

[0279] Thus, in the case of the binding pair that includes, for example, the OX40 immune cell member and the OX40L counter member, an ICSM binding/modulating member can comprise any of the following:

[0280] a) an antibody molecule that binds the OX40 immune cell member and antagonizes stimulation, e.g., by blocking binding of endogenous OX40L counter member;

[0281] b) an antibody molecule that binds OX40L counter member and antagonizes stimulation, e.g., by blocking effective binding of the endogenous OX40L counter member to the OX40 immune cell member;

[0282] c) a soluble fragment or analog of OX40L counter member which binds OX40 immune cell member and antagonizes stimulation; and

[0283] c) a soluble fragment or analog of OX40 immune cell member which binds OX40L counter member and antagonizes stimulation.

[0284] For example, the ICSM binding/modulating moiety, e.g., an antibody molecule or an antagonistic analog or of the counter member, can bind to CD2, ICOS, CD40L, CD28, LFA1, SLAM, TIM1, CD30, OX40 (CD134), 41BB (CD137), CD27, HVEM, DR3, GITR, BAFFR, TACI, BCMA, CD30, or CD40. In another embodiment, the ICSM binding/modulating moiety, e.g., an antibody molecule or an antagonistic analog or of the counter member, can bind to B7.1, B7.2, ICOSL (B7-H2, B7RP1), LFA3, CD48, CD58, ICAM1, SLAM, TIM4, CD40, CD30L, OX40L (CD252), 41BBL (CD137L), CD70, LIGHT, TL1A, GITRL, BAFF, APRIL, CD30, or CD40L.

[0285] In some embodiments, the ICSM binding/modulating molecule binds, and antagonizes, an activating or costimulatory molecule, e.g., a costimulatory molecule, present on an immune cell, or binds the counter member preventing the counter member from activating the costimulatory molecule present on the immune cell. In some embodiments, the ICSM comprises an antagonistic antibody molecule e.g., an antibody molecule that binds the costimulatory molecule on an immune cell or binds the counter member of the ICSM, preventing the counter member from activating the costimulatory molecule on the immune cell, and results in inhibiting the activity of the costimulatory molecule. In some embodiments, the ICSM comprises an antagonistic counterpart molecule, e.g., a fragment of a molecule that binds the costimulatory molecule, and results in the inhibition of the costimulatory molecule activity.

[0286] In some embodiments, one member of the binding pair will be on the surface of an immune cell, e.g., a T, B, or NK cell or dendritic cell, while the counter member will be on another immune cell, or an APC such as a dendritic cell, or on non-immune cells such as smooth muscle cells, or endothelial cells.

[0287] The following table provides non-limiting examples of costimulatory molecule and counterstructure pairs.

TABLE 2
Costimulatory molecule and counterstructure pairs

| Costimulatory molecule | |
|---|---|
| (e.g., on T cells) | Counterstructure |
| CD28 | B7.1 or B7.2 |
| ICOS | ICOSL (B7H-2, B7RP1) |
| CD2 | LFA3, CD48, CD58 |
| LFA1 | ICAM1 |
| SLAM | SLAM |
| TIM1 | TIM4 |
| CD40L | CD40 |
| CD30 | CD30L |
| OX40/CD134 | OX40L (CD252) |
| 41BB/CD137 | 41BBL (CD137L) |
| CD27 | CD70 |
| HVEM | LIGHT |
| DR3 | TL1A |
| GITR | GITRL |
| BAFFR | BAFF |
| TACI | BAFF and APRIL |
| BCMA | BAFF and APRIL |
| CD40 | CD40L |
| CD30L | CD30 |

### Donor Tissue

[0288] Therapeutic compounds and methods described herein can be used in conjunction with a transplantation of donor tissue into a subject and minimizes rejection of, minimizes immune effector cell mediated damage to, prolongs acceptance of, or prolongs the functional life of, donor transplant tissue. The tissue can be xenograft or allograft tissue. Transplanted tissue can comprise all or part of an organ, e.g., a liver, kidney, heart, pancreas, thymus, skin, or lung. In embodiments, therapeutic compounds described herein reduce, or eliminate the need for systemic immune suppression. Therapeutic compounds and methods described herein can also be used to treat GVHD. In some embodiments, host cells are coated with a therapeutic compound that comprises, as an effector binding/modulating moiety, a PD-L1 molecule.

[0289] Table 2A provides target molecules for transplant indications. A target molecule is the target to which a targeting moiety binds. As discussed elsewhere herein, in some embodiments, a targeting moiety is selected that binds a product of an allele present on donor tissue and which is not expressed by the subject (recipient) or at expressed at a different level (e.g., reduced or substantially reduced).

TABLE 2A
Target Molecules for Transplant Indications

| | Organ/ | |
|---|---|---|
| Indication | cell type | Target |
| Allograft transplant tissue, | All | HLA-A, HLA-B, HLA-C, |
| e.g., allograft solid organ | | HLA-DP, HLA-DQ, or |
| transplant, GVHD | | HLA-DR |
| Transplant | Kidney | Antigens expressed in the |
| | | kidney where immune cells |
| | | infiltrate, for example |
| | | including but not limited to |
| | | the tubular interstitial region |
| | | e.g., uromodulin, SLC22A2, |
| | | SLC22A6, FXYD4, |
| | | SLC5A10, SLC6A13, AQP6, |
| | | SLC13A3, TMEM72, BSND, |
| | | NPR3, and the proximal and |
| | | distal tubular epithelium, |
| | | such as OAT1, OCT2 |

### Auto-Immune Disorders

[0290] Therapeutic compounds and methods described herein can be used to treat a subject having, or at risk for having, an unwanted autoimmune response, e.g., an autoimmune response in Type 1 diabetes, multiple sclerosis, cardiomyositis, vitiligo, alopecia, inflammatory bowel disease (IBD, e.g., Crohn's disease or ulcerative colitis), Sjogren's syndrome, focal segmented glomerular sclerosis (FSGS), scleroderma/systemic sclerosis (SSc) or rheumatoid arthritis. In some embodiments, the treatment minimizes rejection of, minimizes immune effector cell mediated damage to, prolongs the survival of subject tissue undergoing, or a risk for, autoimmune attack. Table 4 provides target molecules for several autoimmune indications and organ/cell types. A target molecule is the target to which a targeting moiety binds.

TABLE 4
Target Molecules for Autoimmune Indications

| Indication | Organ/cell type | Target Molecule |
|---|---|---|
| Type 1 diabetes and | Pancreas/pancreatic islets, | SEZ6L2, LRP11, DISP2, |
| transplant | beta cells | SLC30A8, FXYD2 TSPAN7 |
| | | TMEM27 (Hald et al 2012 |
| | | Diabetelogia 55: 154), |
| | | FXYD2, GPR119, |
| | | HEPACAM2, |
| | | DPP6, or MAdCAM |
| Multiple sclerosis | CNS/myelin sheath of | MOG, PLP, MBP |
| | oligodendrocytes | |
| Cardiomyositis, rheumatoid | Cardiomyocytes, monocytes, | SIRPA (CD172a) |
| arthritis | macrophages, myeloid cells | |
| Inflammatory bowel disease | Intestine | MAdCAM |
| (ulcerative colitis, Crohn's | | |
| disease), GVHD, celiac | | |
| disease | | |
| Autoimmune hepatitis (AIH), | liver | MAdCAM |
| primary sclerosing | | |
| cholangitis (PSC, | | |
| primary biliary sclerosis | | |
| (PBC), transplant | | |
| Focal segmented glomerular | Kidney, podocytes, tubules, | COL1A1, cadherin 2, |
| sclerosis (FSGS) and other | epithelial cells | VCAM-1, Thy1, podocin, |
| diseases that can affect | | KIM1 (Hodgin et al Am J |
| kidney, for example lupus | | Pathol 177: 1675 2010), |
| nephritis, systemic | | PLA2R, OAT1, OCT2, K- |
| scleroderma, membranous | | cadherin 6 |
| glomerular nephropathy | | |
| (MGN), membranous | | |
| nephropathy (MN), minimal | | |
| change disease (MCD), IgA | | |
| nephropathy, ANCA- | | |
| associated vasculitis (AAV) | | |
| Sjogren's syndrome | Salivary glands, epithelial | FCGR3B, HLAB, KIM1 (Hu |
| | cells, kidney | et al Arth and Rheum |
| | | 56: 3588 2007) |
| Scleroderma, systemic | skin, kidney, lung, fibroblasts, | Collagen I, III, VI, VII, |
| sclerosis (SSc) | connective tissue | fibronectin (Wang et al Arth |
| | | and Rheum 54: 2271 2006) |
| vitiligo | Skin, epidermis, Langerhans | COL17A1, CD1A, CD207, |
| | cells, keratinocytes, | desmoglein 1-4, keratin 1 |
| | melanocytes | |
| Alopecia areata | Skin, hair follicle/hair bulb, | CD133 (Yang and Cotsarelis |
| | dermis | J Dermatol Sci 57: 2 2010) |

[0291] Other examples of autoimmune disorders and diseases that can be treated with the compounds described herein include, but are not limited to, myocarditis, postmyocardial infarction syndrome, postpericardiotomy syndrome, subacute bacterial endocarditis, anti-glomerular basement membrane nephritis, interstitial cystitis, lupus nephritis, membranous glomerulonephropathy, chronic kidney disease (“CKD”), autoimmune hepatitis, primary biliary cirrhosis, primary sclerosing cholangitis, antisynthetase syndrome, alopecia areata, autoimmune angioedema, autoimmune progesterone dermatitis, autoimmune urticaria, bullous pemphigoid, cicatricial pemphigoid, dermatitis herpetiformis, discoid lupus erythematosus, epidermolysis bullosa acquisita, erythema nodosum, gestational pemphigoid, hidradenitis suppurativa, lichen planus, lichen sclerosus, linear IgA disease (lad), morphea, pemphigus vulgaris, pityriasis lichenoides et varioliformis acuta, Mucha-Habermann disease, psoriasis, systemic scleroderma, vitiligo, Addison's disease, autoimmune polyendocrine syndrome (APS) type 1, autoimmune polyendocrine syndrome (APS) type 2, autoimmune polyendocrine syndrome (APS) type 3, autoimmune pancreatitis (AIP), diabetes mellitus type 1, autoimmune thyroiditis, Ord's thyroiditis, Graves' disease, autoimmune oophoritis, endometriosis, autoimmune orchitis, Sjogren's syndrome, autoimmune enteropathy, coeliac disease, Crohn's disease, microscopic colitis, ulcerative colitis, thrombocytopenia, adiposis, dolorosa, adult-onset Still's disease, ankylosing spondylitis, CREST syndrome, drug-induced lupus, enthesitis-related arthritis, eosinophilic fasciitis, Felty syndrome, IgG4-related disease, juvenile arthritis, Lyme disease (chronic), mixed connective tissue disease (MCTD), palindromic rheumatism, Parry Romberg syndrome, Parsonage-Turner syndrome, psoriatic arthritis, reactive arthritis, relapsing polychondritis, retroperitoneal fibrosis, rheumatic fever, rheumatoid arthritis, sarcoidosis, Schnitzler syndrome, systemic lupus erythematosus (SLE), undifferentiated connective tissue disease (UCTD), dermatomyositis, fibromyalgia, inclusion body myositis, myositis, myasthenia gravis, neuromyotonia, paraneoplastic cerebellar degeneration, polymyositis, acute disseminated encephalomyelitis (ADEM), acute motor axonal neuropathy, anti-N-methyl-D-aspartate (anti-NMDA) receptor encephalitis, Balo concentric sclerosis, Bickerstaff's encephalitis, chronic inflammatory demyelinating polyneuropathy, Guillain-Barre syndrome, Hashimoto's encephalopathy, idiopathic inflammatory demyelinating diseases, Lambert-Eaton myasthenic syndrome, multiple sclerosis, Oshtoran syndrome, pediatric autoimmune neuropsychiatric disorder associated with streptococcus (PANDAS), progressive inflammatory neuropathy, restless leg syndrome, stiff person syndrome, Sydenham chorea, transverse myelitis, autoimmune retinopathy, autoimmune uveitis, Cogan syndrome, Graves ophthalmopathy, intermediate uveitis, ligneous conjunctivitis, Mooren's ulcer, neuromyelitis optica, opsoclonus myoclonus syndrome, optic neuritis, scleritis, Susac's syndrome, sympathetic ophthalmia, Tolosa-Hunt syndrome, autoimmune inner ear disease (AIED), Meniere's disease, Behcet's disease, eosinophilic granulomatosis with polyangiitis (EGPA), giant cell arteritis, granulmatosis with polyangiitis (GPA), IgA vasculitis (IgAV), Kawasaki's disease, leukocytoclastic vasculitis, lupus vasculitis, rheumatoid vasculitis, microscopic polyangiitis (MPA), polyarteritis nodosa (PAN), polymyalgia rheumaticia, vasculitis, primary immune deficiency, and the like.

[0292] Other examples of potential autoimmune disorders and diseases, as well as autoimmune comorbidities that can be treated with the compounds described herein include, but are not limited to, chronic fatigue syndrome, complex regional pain syndrome, eosinophilic esophagitis, gastirtis, interstitial lung disease, POEMS syndrome, Raynaud's phenomenon, primary immunodeficiency, pyoderma gangrenosum, agammaglobulinemia, anyloidosis, anyotrophic lateral sclerosis, anti-tubular basement membrane nephritis, atopic allergy, atopic dermatitis, autoimmune peripheral neuropathy, Blau syndrome, Castleman's disease, Chagas disease, chronic obstructive pulmonary disease, chronic recurrent multifocal osteomyelitis, complement component 2 deficiency, contact dermatitis, Cushing's syndrome, cutaneous leukocytoclastic angiitis, Dego′ disease, eczema, eosinophilic gastroenteritis, eosinophilic pneumonia, erythroblastosis fetalsis, fibrodysplasia ossificans progressive, gastrointestinal pemphigoid, hypogammaglobulinemia, idiopathic giant cell myocarditis, idiopathic pulmonary fibrosis, IgA nephropathy, immunregulatory lipoproteins, IPEX syndrome, ligenous conjunctivitis, Majeed syndrome, narcolepsy, Rasmussen's encephalitis, schizophrenia, serum sickness, spondyloathropathy, Sweet's syndrome, Takayasu's arteritis, and the like.

[0293] In some embodiments, the autoimmune disorder does not comprise pemphigus vulgaris, pemphigus. In some embodmeints, the autoimmune disorder does not comprise pemphigus foliaceus. In some embodiments, the autoimmune disorder does not comprise bullous pemphigoid. In some embodiments, the autoimmune disorder does not comprise Goodpasture's disease. In some embodiments, the autoimmune disorder does not comprise psoriasis. In some embodiments, the autoimmune disorder does not comprise a skin disorder. In some embodiments, the disorder does not comprise a neoplastic disorder, e.g., cancer.

### Therapeutic Compounds

[0294] A therapeutic compound comprises a specific targeting moiety functionally associated with an effector binding/modulating moiety. In some embodiments, the specific targeting moiety and effector binding/modulating moiety are linked to one another by a covalent or noncovalent bond, e.g., a covalent or non-covalent bond directly linking the one to the other. In other embodiments, a specific targeting moiety and effector binding/modulating moiety are linked, e.g., covalently or noncovalently, through a linker moiety. E.g., in the case of a fusion polypeptide, a polypeptide sequence comprising the specific targeting moiety and a polypeptide sequence can be directly linked to one another or linked through one or more linker sequences. In some embodiments, the linker moiety comprises a polypeptide. Linkers are not, however, limited to polypeptides. In some embodiments, a linker moiety comprises other backbones, e.g., a non-peptide polymer, e.g., a PEG polymer. In some embodiments, a linker moiety can comprise a particle, e.g., a nanoparticle, e.g., a polymeric nanoparticle. In some embodiments, a linker moiety can comprise a branched molecule, or a dendrimer. However, in embodiments where the effector binding/modulating moiety comprises an ICIM binding/modulating moiety (which binds an effector like PD-1) structures that result in clustering in the absence of target binding should be avoided as they may cause clustering in the absence of target binding. Thus in embodiments, the therapeutic compound has a structure, e.g., the copies of an ICIM are sufficiently limited, such that clustering in the absence of target binding is minimized or substantially eliminated, or eliminated, or is sufficiently minimized that substantial systemic immune suppression does not occur.

[0295] In some embodiments, a therapeutic compound comprises a polypeptide comprising a specific targeting moiety covalently or non-covalently conjugated to an effector binding/modulating moiety. In some embodiments, a therapeutic molecule comprises a fusion protein having comprising a specific targeting moiety fused, e.g., directly or through a linking moiety comprising one or more amino acid residues, to an effector binding/modulating moiety. In some embodiments, a therapeutic molecule comprises a polypeptide comprising a specific targeting moiety linked by a non-covalent bond or a covalent bond, e.g., a covalent bond other than a peptide bond, e.g., a sulfhydryl bond, to an effector binding/modulating moiety.

[0296] In some embodiments, a therapeutic compound comprises polypeptide, e.g., a fusion polypeptide, comprising:

[0297] 1.a) a specific targeting moiety comprising a target specific binding polypeptide;

[0298] 1.b) a specific targeting moiety comprising a target ligand binding molecule;

[0299] 1.c) a specific targeting moiety comprising an antibody molecule;

[0300] 1.d) a specific targeting moiety comprising a single chain antibody molecule, e.g., a scFv domain; or

[0301] 1.e) a specific targeting moiety comprising a first of the light or heavy chain variable region of an antibody molecule, and wherein the other variable region is covalently or non-covalently associated with the first;

[0302] and

[0303] 2.a) an effector binding/modulating moiety comprising an effector specific binding polypeptide;

[0304] 2.b) an effector binding/modulating moiety comprising an effector ligand binding molecule;

[0305] 2.c) an effector binding/modulating moiety comprising an antibody molecule;

[0306] 2.d) an effector binding/modulating moiety comprising a single chain antibody molecule, e.g., a scFv domain; or

[0307] 2.e) an effector binding/modulating moiety comprising a first of the light or heavy chain variable region of an antibody molecule, and wherein the other variable region is covalently or non-covalently associated with the first.

[0308] In some embodiments, a therapeutic compound comprises 1.a and 2.a.

[0309] In some embodiments, a therapeutic compound comprises 1.a and 2.b.

[0310] In some embodiments, a therapeutic compound comprises 1.a and 2.c.

[0311] In some embodiments, a therapeutic compound comprises 1.a and 2.d.

[0312] In some embodiments, a therapeutic compound comprises 1.a and 2.e.

[0313] In some embodiments, a therapeutic compound comprises 1.b and 2.a.

[0314] In some embodiments, a therapeutic compound comprises 1.b and 2.b.

[0315] In some embodiments, a therapeutic compound comprises 1.b and 2.c.

[0316] In some embodiments, a therapeutic compound comprises 1.b and 2.d.

[0317] In some embodiments, a therapeutic compound comprises 1.b and 2.e.

[0318] In some embodiments, a therapeutic compound comprises 1.c and 2.a.

[0319] In some embodiments, a therapeutic compound comprises 1.c and 2.b.

[0320] In some embodiments, a therapeutic compound comprises 1.c and 2.c.

[0321] In some embodiments, a therapeutic compound comprises 1.c and 2.d.

[0322] In some embodiments, a therapeutic compound comprises 1.c and 2.e.

[0323] In some embodiments, a therapeutic compound comprises 1.d and 2.a.

[0324] In some embodiments, a therapeutic compound comprises 1.d and 2.b.

[0325] In some embodiments, a therapeutic compound comprises 1.d and 2.c.

[0326] In some embodiments, a therapeutic compound comprises 1.d and 2.d.

[0327] In some embodiments, a therapeutic compound comprises 1.d and 2.e.

[0328] In some embodiments, a therapeutic compound comprises 1.e and 2.a.

[0329] In some embodiments, a therapeutic compound comprises 1.e and 2.b.

[0330] In some embodiments, a therapeutic compound comprises 1.e and 2.c.

[0331] In some embodiments, a therapeutic compound comprises 1.e and 2.d.

[0332] In some embodiments, a therapeutic compound comprises 1.e and 2.e.

[0333] Therapeutic compounds disclosed herein can, for example, comprise a plurality of effector binding/modulating and specific targeting moieties. Any suitable linker or platform can be used to present the plurality of moieties. The linker is typically coupled or fused to one or more effector binding/modulating and targeting moieties.

[0334] In some embodiments, two (or more) linkers associate, either covalently or non-covalently, e.g., to form a hetero- or homodimeric therapeutic compound. E.g., the linker can comprise an Fc region and two Fc regions associate with one another. In some embodiments of a therapeutic compound comprising two linker regions, the linker regions can self associate, e.g., as two identical Fc regions. In some embodiments of a therapeutic compound comprising two linker regions, the linker regions are not capable of, or not capable of substantial, self association, e.g., the two Fc regions can be members of a knob and hole pair.

[0335] Non-limiting exemplary configurations of therapeutic compounds comprise the following (e.g., in N to C terminal order):

[0336] R1-Linker Region A-R2

[0337] R3-Linker Region B-R4,

wherein,

[0338] R1, R2, R3, and R4, each independently comprises an effector binding/modulating moiety, e.g., an ICIM binding/modulating moiety, an IIC binding/modulating moiety, ICSM binding/modulating moiety, or an SM binding/modulating moiety, a specific targeting moiety, or is absent;

[0339] Linker Region A and Linker Region B comprise moieties that can associate with one another, e.g., Linker A and Linker B each comprises an Fc moiety provided that an effector binding/modulating moiety and a specific targeting moiety are present.

[0340] In some embodiments:

[0341] R1 comprises an effector binding/modulating moiety, e.g., an ICIM binding/modulating moiety, an IIC binding/modulating moiety, ICSM binding/modulating moiety, or an SM binding/modulating moiety, or is absent;

[0342] R2 comprises a specific targeting moiety, or is absent;

[0343] R3 comprises an effector binding/modulating moiety, e.g., an ICIM binding/modulating moiety, an IIC binding/modulating moiety, ICSM binding/modulating moiety, or an SM binding/modulating moiety, or is absent;

[0344] R4 comprises a specific targeting moiety, or is absent;

[0345] Linker Region A and Linker Region B comprise moieties that can associate with one another, e.g., Linker A and Linker B each comprises an Fc moiety, provided that one of R1 or R3 is present and one of R2 or R4 is present.

[0346] In some embodiments:

[0347] R1 comprises a specific targeting moiety, or is absent;

[0348] R2 comprises an effector binding/modulating moiety, e.g., an ICIM binding/modulating moiety, an IIC binding/modulating moiety, ICSM binding/modulating moiety, or an SM binding/modulating moiety, or is absent;

[0349] R3 comprises a specific targeting moiety, or is absent;

[0350] R4 comprises an effector binding/modulating moiety, e.g., an ICIM binding/modulating moiety, an IIC binding/modulating moiety, ICSM binding/modulating moiety, or an SM binding/modulating moiety, or is absent;

[0351] Linker Region A and Linker Region B comprise moieties that can associate with one another, e.g., Linker A and Linker B each comprises an Fc moiety, provided that one of R1 or R3 is present and one of R2 or R4 is present.

Non-limiting examples include, but are not limited to:

| | Linker | | | Linker | | |
|---|---|---|---|---|---|---|
| R1 | Region A | R2 | R3 | Region B | R4 | Other |
| HCVR and | Fc Region | fcFv | HCVR | Fc Region | scFv | Self Pairing |
| LCVR | | | and | | | Linker Regions |
| | | | LCVR | | | |
| HCVR and | Fc Region | fcFv | HCVR | Fc Region | scFv | Non-Self |
| LCVR | | | and | | | Pairing linker |
| | | | LCVR | | | regions |
| HCVR and | Fc Region | fcFv | HCVR | Fc Region | scFv | Self Pairing |
| LCVR (or | | | and | | | Linker Regions |
| absent) | | | LCVR (or | | | One of R1 or |
| | | | absent) | | | R3 is absent. |
| HCVR and | Fc Region | fcFv | HCVR | Fc Region | scFv | Non-Self |
| LCVR (or | | | and | | | Pairing Linker |
| absent) | | | LCVR (or | | | Regions |
| | | | absent) | | | One of R1 or |
| | | | | | | R3 is absent. |
| HCVR and | Fc Region | fcFv (or | HCVR | Fc Region | scFv (or | Self Pairing |
| LCVR | | absent) | and | | absent) | linker regions |
| | | | LCVR | | | One of R2 or |
| | | | | | | R4 is absent. |
| HCVR and | Fc Region | fcFv (or | HCVR | Fc Region | scFv (or | Non-Self |
| LCVR | | absent) | and | | absent) | Pairing linker |
| | | | LCVR | | | regions |
| | | | | | | One of R2 or |
| | | | | | | R4 is absent. |
| HCVR and | Fc Region | fcFv | HCVR | Fc Region | scFv | Self Pairing |
| LCVR | | | and | | | Linker Regions |
| | | | LCVR | | | R1 and R3 are |
| | | | | | | the same |
| HCVR and | Fc Region | fcFv | HCVR | Fc Region | scFv | Non-Self |
| LCVR | | | and | | | Pairing linker |
| | | | LCVR | | | regions |
| | | | | | | R1 and R3 are |
| | | | | | | different |
| HCVR and | Fc Region | fcFv | HCVR | Fc Region | scFv | Self Pairing |
| LCVR | | | and | | | Linker Regions |
| | | | LCVR | | | R2 and R4 are |
| | | | | | | the same |
| HCVR and | Fc Region | fcFv | HCVR | Fc Region | scFv | Non-Self |
| LCVR | | | and | | | Pairing linker |
| | | | LCVR | | | regions |
| | | | | | | R2 and R4 are |
| | | | | | | different |

HCVR and LCVR: refers to an moiety comprising an antigen binding portion of a heavy and light chian variable region, typically with the heavy chain fused to the Linker region.
Self pairing: wherein a liker region can pair with itself, e.g., an Fc region that can pair a copy of itself.
Non-self pairing: wherein a Linker Region does not pair with itself, or does not substantially pair with itself, e.g., an Fc region does not, or does not significantly pair with itself, e.g., wherein Linker Region A and Linker Region B are members of a knob and hole pair.

In some embodiments:
R1, R2, R3 and R4 each independently comprise: an effector binding modulating moiety that activates an inhibitory receptor on an immune cell, e.g., a T cell or a B cell, e.g., a PD-L1 molecule or a functional anti-PD-1 antibody molecule (an agonist of PD-1), a specific targeting moiety, or is absent;
provided that an effector binding moiety and a specific targeting moiety are present.
In some embodiments, Linker A and Linker B comprise Fc moieties (e.g., self pairing Fc moieties).
In some embodiments:
R1 and R3 independently comprise an effector binding modulating moiety that activates an inhibitory receptor on an immune cell, e.g., a T cell or a B cell, e.g., a PD-L1 molecule or an functional anti-PD-1 antibody molecule (an agonist of PD-1); and
R2 and R4 independently comprise specific targeting moieties, e.g., scFv molecules against a tissue antigen.
In some embodiments, Linker A and Linker B comprise Fc moieties (e.g., self pairing Fc moieties).
In some embodiments:
R1 and R3 independently comprise a functional anti-PD-1 antibody molecule (an agonist of PD-1); and
R2 and R4 independently comprise specific targeting moieties, e.g., scFv molecules against a tissue antigen.
In some embodiments, Linker A and Linker B comprise Fc moieties (e.g., self pairing Fc moieties).
In some embodiments:
R1 and R3 independently comprise specific targeting moieties, e.g., an anti-tissue antigen antibody; and
R2 and R4 independently comprise a functional anti-PD-1 antibody molecule (an agonist of PD-1), e.g., an scFv molecule.
In some embodiments, Linker A and Linker B comprise Fc moieties (e.g., self pairing Fc moieties).
In some embodiments:
R1 and R3 independently comprise a PD-L1 molecule (an agonist of PD-1); and
R2 and R4 independently comprise specific targeting moieties, e.g., scFv molecules against a tissue antigen; and
in some embodiments, Linker A and Linker B comprise Fc moieties (e.g., self pairing Fc moieties).
In some embodiments:
R1 and R3 independently comprise specific targeting moieties, e.g., an anti-tissue antigen antibody; and
R2 and R4 independently comprise a PD-L1 molecule (an agonist of PD-1).
In some embodiments, Linker A and Linker B comprise Fc moieties (e.g., self pairing Fc moieties).
In some embodiments:
R1, R2, R3 and R4 each independently comprise: an SM binding/modulating moiety which modulates, e.g., binds and inhibits, sequesters, degrades or otherwise neutralizes a substance, e.g., a soluble molecule that modulates an immune response, e.g., ATP or AMP, e.g., a CD39 molecule or a CD73 molecule; a specific targeting moiety, or is absent;
provided that an SM binding/modulating moiety and a specific targeting moiety are present.
In some embodiments, Linker A and Linker B comprise Fc moieties (e.g., self pairing Fc moieties or Fc moieties that do not, or do not substantially self pair).
In some embodiments:
R1 and R3 independently comprise an SM binding/modulating moiety which modulates, e.g., binds and inhibits, sequesters, degrades or otherwise neutralizes a substance, e.g., a soluble molecule that modulates an immune response, e.g., ATP or AMP, e.g., a CD39 molecule or a CD73 molecule; and
R2 and R4 independently comprise specific targeting moieties, e.g., scFv molecules against a tissue antigen.
In some embodiments, Linker A and Linker B comprise Fc moieties (e.g., self pairing Fc moieties or Fc moieties that do not, or do not substantially self pair).
In some embodiments:
R1 and R3 independently comprise a CD39 molecule or a CD73 molecule; and
R2 and R4 independently comprise specific targeting moieties, e.g., scFv molecules against a tissue antigen.
In some embodiments, Linker A and Linker B comprise Fc moieties (e.g., self pairing Fc moieties or Fc moieties that do not, or do not substantially self pair).
In some embodiments:
R1 and R3 each comprises a CD39 molecule; and
R2 and R4 independently comprise specific targeting moieties, e.g., scFv molecules against a tissue antigen; and
in some embodiments, Linker A and Linker B comprise Fc moieties (e.g., self pairing Fc moieties or Fc moieties that do not, or do not substantially self pair).
In some embodiments:
R1 and R3 each comprises a CD73 molecule; and
R2 and R4 independently comprise specific targeting moieties, e.g., scFv molecules against a tissue antigen.
In some embodiments, Linker A and Linker B comprise Fc moieties (e.g., self pairing Fc moieties or Fc moieties that do not, or do not substantially self pair).
In some embodiments:
One of R1 and R3 comprises a CD39 molecule and the other comprises a CD73 molecule; and
R2 and R4 independently comprise specific targeting moieties, e.g., scFv molecules against a tissue antigen.
In some embodiments, Linker A and Linker B comprise Fc moieties (e.g., self pairing Fc moieties or Fc moieties that do not, or do not substantially self pair).
In some embodiments:
R1, R2, R3 and R4 each independently comprise: an HLA-G molecule; a specific targeting moiety, or is absent;
provided that an HLA-G molecule and a specific targeting moiety are present.
In some embodiments, Linker A and Linker B comprise Fc moieties (e.g., self pairing Fc moieties or Fc moieties that do not, or do not substantially self pair).
In some embodiments:
R1 and R3 each comprise an HLG-A molecule; and
R2 and R4 independently comprise specific targeting moieties, e.g., scFv molecules against a tissue antigen.
In some embodiments, Linker A and Linker B comprise Fc moieties (e.g., self pairing Fc moieties or Fc moieties that do not, or do not substantially self pair).
In some embodiments:
R1 and R3 each comprise an agonistic anti-LILRB1 antibody molecule; and
R2 and R4 independently comprise specific targeting moieties, e.g., scFv molecules against a tissue antigen.
In some embodiments, Linker A and Linker B comprise Fc moieties (e.g., self pairing Fc moieties or Fc moieties that do not, or do not substantially self pair).
In some embodiments:
R1 and R3 each comprise an agonistic anti-KIR2DL4 antibody molecule; and
R2 and R4 independently comprise specific targeting moieties, e.g., scFv molecules against a tissue antigen.
In some embodiments, Linker A and Linker B comprise Fc moieties (e.g., self pairing Fc moieties or Fc moieties that do not, or do not substantially self pair).
In some embodiments:
R1 and R3 each comprise an agonistic anti-LILRB2 antibody molecule; and
R2 and R4 independently comprise specific targeting moieties, e.g., scFv molecules against a tissue antigen.
In some embodiments, Linker A and Linker B comprise Fc moieties (e.g., self pairing Fc moieties or Fc moieties that do not, or do not substantially self pair).
In some embodiments:
R1 and R3 each comprise an agonistic anti-NKG2A antibody molecule; and
R2 and R4 independently comprise specific targeting moieties, e.g., scFv molecules against a tissue antigen.
In some embodiments, Linker A and Linker B comprise Fc moieties (e.g., self pairing Fc moieties or Fc moieties that do not, or do not substantially self pair).
In some embodiments:
one of R1 and R3 comprises a first moiety chosen from, and the other comprises a different moiety chosen from: an antagonistic anti-LILRB1 antibody molecule, an agonistic anti-KR2DL4 antibody molecule, and an agonistic anti-NKG2A antibody molecule; and
R2 and R4 independently comprise specific targeting moieties, e.g., scFv molecules against a tissue antigen.
In some embodiments, Linker A and Linker B comprise Fc moieties (e.g., self pairing Fc moieties or Fc moieties that do not, or do not substantially self pair).
In some embodiments:
one of R1 and R3 comprises an antagonistic anti-LILRB1 antibody molecule and the other comprises an agonistic anti-KR2DL4 antibody molecule; and
R2 and R4 independently comprise specific targeting moieties, e.g., scFv molecules against a tissue antigen.
In some embodiments, Linker A and Linker B comprise Fc moieties (e.g., self pairing Fc moieties or Fc moieties that do not, or do not substantially self pair).
In some embodiments:
one of R1 and R3 comprises an antagonistic anti-LILRB1 antibody molecule and the other comprises an agonistic anti-NKG2A antibody molecule; and
R2 and R4 independently comprise specific targeting moieties, e.g., scFv molecules against a tissue antigen.
In some embodiments, Linker A and Linker B comprise Fc moieties (e.g., self pairing Fc moieties or Fc moieties that do not, or do not substantially self pair).

[0352] In an embodiment:

[0353] R1, R2, R3 and R4 each independently comprise: an IL-2 mutein molecule; a specific targeting moiety, or is absent;

[0354] provided that an IL-2 mutein molecule and a specific targeting moiety are present.

[0355] In an embodiment, Linker A and Linker B comprise Fc moieties (e.g., self pairing Fc moieties or Fc moieties that do not, or do not substantially self pair).

[0356] One of R1, R2, R3 and R4 comprises an IL-2 mutein molecule, one comprises an anti-GITR antibody molecule, e.g., an anti-GITR antibody molecule that inhibits binding of GITRL to GITR, and one comprises a specific targeting moiety;

[0357] In an embodiment, Linker A and Linker B comprise Fc moieties (e.g., self pairing Fc moieties or Fc moieties that do not, or do not substantially self pair).

[0358] In an embodiment:

[0359] R1 and R3 each comprise an IL-2 mutein molecule; and

[0360] R2 and R4 independently comprise specific targeting moieties, e.g., scFv molecules against a tissue antigen.

[0361] In an embodiment Linker A and Linker B comprise Fc moieties (e.g., self pairing Fc moieties or Fc moieties that do not, or do not substantially self pair).

[0362] In an embodiment:

[0363] one of R1 and R3 comprises a GARP binding molecule, e.g., an anti-GARP antibody molecule or a GITR binding molecule, e.g., an anti-GITR antibody molecule and the other comprises an IL-2 mutein molecule; and

[0364] R2 and R4 independently comprise specific targeting moieties, e.g., scFv molecules against a tissue antigen.

[0365] In an embodiment, Linker A and Linker B comprise Fc moieties (e.g., self pairing Fc moieties or Fc moieties that do not, or do not substantially self pair).

[0366] In an embodiment:

[0367] one of R1 and R3 comprises a GARP binding molecule, e.g., an anti-GARP antibody molecule and the other comprises an IL-2 mutein molecule; and

[0368] R2 and R4 independently comprise specific targeting moieties, e.g., scFv molecules against a tissue antigen.

[0369] In an embodiment, Linker A and Linker B comprise Fc moieties (e.g., self pairing Fc moieties or Fc moieties that do not, or do not substantially self pair).

[0370] In an embodiment:

[0371] one of R1 and R3 comprises a GITR binding molecule, e.g., an anti-GITR antibody molecule, and the other comprises an IL-2 mutein molecule; and

[0372] R2 and R4 independently comprise specific targeting moieties, e.g., scFv molecules against a tissue antigen.

[0373] In an embodiment, Linker A and Linker B comprise Fc moieties (e.g., self pairing Fc moieties or Fc moieties that do not, or do not substantially self pair).

[0374] In some embodiments:

R1, R2, R3 and R4 each independently comprise: an effector binding modulating moiety that activates an inhibitory receptor on a B cell, e.g., an anti-FCRL antibody molecule, e.g., an agonistic anti-FCRL antibody molecule; a specific targeting moiety, or is absent;
provided that an effector binding moiety and a specific targeting moiety are present.
In some embodiments, Linker A and Linker B comprise Fc moieties (e.g., self pairing Fc moieties or Fc moieties that do not, or do not substantially self pair).

[0375] In an embodiment, the anti-FCRL molecule comprises: an anti-FCRL antibody molecule, e.g., an agonistic anti-FCRL antibody molecule, directed to FCRL1, FCRL2, FCRL3, FCRL4, FCRL5, or FCRL6.

In some embodiments:
R1 and R3 each comprises an agonistic anti-FCRL antibody molecule; and
R2 and R4 independently comprise specific targeting moieties, e.g., scFv molecules against a tissue antigen.
In some embodiments, Linker A and Linker B comprise Fc moieties (e.g., self pairing Fc moieties or Fc moieties that do not, or do not substantially self pair).

[0376] In an embodiment, the anti-FCRL molecule comprises: an anti-FCRL antibody molecule, e.g., an agonistic anti-FCRL antibody molecule directed to FCRL1, FCRL2, FCRL3, FCRL4, FCRL5, or FCRL6.

In some embodiments:
R1 and R3 independently comprise specific targeting moieties, e.g., antibody molecules against a tissue antigen; and
R2 and R4 each comprises an anti-FCRL antibody molecule, e.g., an agonistic anti-FCRL antibody molecule, e.g., an scFv molecule.
In some embodiments, Linker A and Linker B comprise Fc moieties (e.g., self pairing Fc moieties or Fc moieties that do not, or do not substantially self pair).

[0377] In an embodiment, the anti-FCRL molecule comprises: an anti-FCRL antibody molecule, e.g., an agonistic anti-FCRL antibody molecule directed to FCRL1, FCRL2, FCRL3, FCRL4, FCRL5, or FCRL6.

In some embodiments:
One of R1, R2, R3 and R4 comprises an anti-BCR antibody molecule, e.g., an antagonistic anti-BCR antibody molecule, one comprises an anti FCRL antibody molecule, and one comprises a specific targeting moiety.
In some embodiments, Linker A and Linker B comprise Fc moieties (e.g., self pairing Fc moieties or Fc moieties that do not, or do not substantially self pair).

[0378] In some embodiments, the anti-FCRL molecule comprises an anti-FCRL antibody molecule, e.g., an agonistic anti-FCRL antibody molecule directed to FCRL1, FCRL2, FCRL3, FCRL4, FCRL5, or FCRL6.

In some embodiments:
One of R1, R2, R3 and R4 comprises a bispecfic antibody molecule comprising an anti-BCR antibody molecule, e.g., an antagonistic anti-BCR antibody molecule, and an anti FCRL antibody molecule, and one comprises a specific targeting moiety.
In some embodiments, Linker A and Linker B comprise Fc moieties (e.g., self pairing Fc moieties or Fc moieties that do not, or do not substantially self pair).

[0379] In an embodiment, the anti-FCRL molecule comprises an anti-FCRL antibody molecule, e.g., an agonistic anti-FCRL antibody molecule directed to FCRL1, FCRL2, FCRL3, FCRL4, FCRL5, or FCRL6.

In some embodiments:
R1, R2, R3 and R4 each independently comprise:
i) an effector binding/modulating moiety, e.g., an ICIM binding/modulating moiety, an IIC binding/modulating moiety, ICSM binding/modulating moiety, or an SM binding/modulating moiety, that minimizes or inhibits T cell activity, expansion, or function (a T cell effector binding/modulating moiety);
ii) an effector binding/modulating moiety, e.g., an ICIM binding/modulating moiety, an IIC binding/modulating moiety, ICSM binding/modulating moiety, or an SM binding/modulating moiety, that minimizes or inhibits B cell activity, expansion, or function (a B cell effector binding/modulating moiety);
iii) a specific targeting moiety; or
iv) is absent;
provided that, a T cell effector binding/modulating moiety, a B cell effector binding/modulating moiety, and a specific targeting moiety are present.
In some embodiments, Linker A and Linker B comprise Fc moieties (e.g., self pairing Fc moieties).
In some embodiments, one of R1, R2, R3, and R4 comprises an agonistic anti-PD-1 antibody and one comprises an HLA-G molecule.

[0380] In some embodiments, one of R1, R2, R3, and R4 comprises an SM binding/modulating moiety, e.g., a CD39 molecule or a CD73 molecule. In some embodiments, one of R1, R2, R3, and R4 comprises an entity that binds, activates, or maintains, a regulatory immune cell, e.g., a Treg cell or a Breg cell, for example, an IL-2 mutein molecule.

[0381] In some embodiments, one of R1, R2, R3, and R4 comprises an agonistic anti-PD-1 antibody, or one comprises an HLA-G molecule, and one comprises an IL-2 mutein molecule. In some embodiments, the PD-1 antibody is replaced with a IL-2 mutein molecule. In some embodiments, one of R1, R2, R3, and R4 comprises an agonistic anti-PD-1 antibody, one comprises an HLA-G molecule, and one comprises CD39 molecule, or a CD73 molecule. In some embodiments, the PD-1 antibody is replaced with a IL-2 mutein molecule.

[0382] Linker Regions

[0383] As discussed elsewhere herein specific targeting and effector binding/modulating moieties can be linked by linker regions. Any linker region described herein can be used as a linker. For example, Linker Regions A and B can comprise Fc regions. In some embodiments, a therapeutic compound comprises a Linker Region that can self-associate. In some embodiments, a therapeutic compound comprises a Linker Region that has a moiety that minimizes self association, and typically Linker Region A and Linker Region B are heterodimers. Linkers also include glycine/serine linkers. In some embodiments, the linker can comprise one or more repeats of GGGGS (SEQ ID NO: 23). In some embodiments, the linker comprises 1, 2, 3, 4, or 5 repeats of SEQ ID NO: 23. In some embodiments, the linker comprises of GGGGSGGGGSGGGGSGGGGS (SEQ ID NO: 22) GGGGSGGGGSGGGGS (SEQ ID NO: 30). These linkers can be used in any of the therapeutic compounds or compositions provided herein.

The linker region can comprise a Fc region that has been modified (e.g., mutated) to produce a heterodimer. In some embodiments, the CH3 domain of the Fc region can be mutated. Examples of such Fc regions can be found in, for example, U.S. Pat. No. 9,574,010, which is hereby incorporated by reference in its entirety. The Fc region as defined herein comprises a CH3 domain or fragment thereof, and may additionally comprise one or more addition constant region domains, or fragments thereof, including hinge, CH1, or CH2. It will be understood that the numbering of the Fc amino acid residues is that of the EU index as in Kabat et al 1991, NIH Publication 91-3242, National Technical Information Service, Springfield, Va. The “EU index as set forth in Kabat” refers to the EU index numbering of the human IgG1 Kabat antibody. For convenience, Table B of U.S. Pat. No. 9,574,010 provides the amino acids numbered according to the EU index as set forth in Kabat of the CH2 and CH3 domain from human IgG1, which is hereby incorporated by reference. Table 1.1 of U.S. Pat. No. 9,574,010 provides mutations of variant Fc heterodimers that can be used as linker regions. Table 1.1 of U.S. Pat. No. 9,574,010 is hereby incorporated by reference.

[0384] In some embodiments, the Linker Region A comprises a first CH3 domain polypeptide and a the Linker Region B comprises a second CH3 domain polypeptide, the first and second CH3 domain polypeptides independently comprising amino acid modifications as compared to a wild-type CH3 domain polypeptide, wherein the first CH3 domain polypeptide comprises amino acid modifications at positions T350, L351, F405, and Y407, and the second CH3 domain polypeptide comprises amino acid modifications at positions T350, T366, K392 and T394, wherein the amino acid modification at position T350 is T350V, T350I, T350L or T350M; the amino acid modification at position L351 is L351Y; the amino acid modification at position F405 is F405A, F405V, F405T or F405S; the amino acid modification at position Y407 is Y407V, Y407A or Y407I; the amino acid modification at position T366 is T366L, T366I, T366V, or T366M; the amino acid modification at position K392 is K392F, K392L or K392M; and the amino acid modification at position T394 is T394W, and wherein the numbering of amino acid residues is according to the EU index as set forth in Kabat.

[0385] In some embodiments, the amino acid modification at position K392 is K392M or K392L. In some embodiments, the amino acid modification at position T350 is T350V. In some embodiments, the first CH3 domain polypeptide further comprises one or more amino acid modifications selected from Q347R and one of S400R or S400E. In some embodiments, the second CH3 domain polypeptide further comprises one or more amino acid modifications selected from L351Y, K360E, and one of N390R, N390D or N390E. In some embodiments, the first CH3 domain polypeptide further comprises one or more amino acid modifications selected from Q347R and one of S400R or S400E, and the second CH3 domain polypeptide further comprises one or more amino acid modifications selected from L351Y, K360E, and one of N390R, N390D or N390E. In some embodiments, the amino acid modification at position T350 is T350V. In some embodiments, the amino acid modification at position F405 is F405A. In some embodiments, the amino acid modification at position Y407 is Y407V. In some embodiments, the amino acid modification at position T366 is T366L or T366I. In some embodiments, the amino acid modification at position F405 is F405A, the amino acid modification at position Y407 is and Y407V, the amino acid modification at position T366 is T366L or T366I, and the amino acid modification at position K392 is K392M or K392L. In some embodiments, the first CH3 domain polypeptide comprises the amino acid modifications T350V, L351Y, S400E, F405V and Y407V, and the second CH3 domain polypeptide comprises the amino acid modifications T350V, T366L, N390R, K392M and T394W. In some embodiments, the first CH3 domain polypeptide comprises the amino acid modifications T350V, L351Y, S400E, F405T and Y407V, and the second CH3 domain polypeptide comprises the amino acid modifications T350V, T366L, N390R, K392M and T394W. In some embodiments, the first CH3 domain polypeptide comprises the amino acid modifications T350V, L351Y, S400E, F405S and Y407V, and the second CH3 domain polypeptide comprises the amino acid modifications T350V, T366L, N390R, K392M and T394W. In some embodiments, the first CH3 domain polypeptide comprises the amino acid modifications T350V, L351Y, S400E, F405A and Y407V, and the second CH3 domain polypeptide comprises the amino acid modifications T350V, L351Y, T366L, N390R, K392M and T394W. In some embodiments, the first CH3 domain polypeptide comprises the amino acid modifications Q347R, T350V, L351Y, S400E, F405A and Y407V, and the second CH3 domain polypeptide comprises the amino acid modifications T350V, K360E, T366L, N390R, K392M and T394W. In some embodiments, the first CH3 domain polypeptide comprises the amino acid modifications T350V, L351Y, 5400R, F405A and Y407V, and the second CH3 domain polypeptide comprises the amino acid modifications T350V, T366L, N390D, K392M and T394W. In some embodiments, the first CH3 domain polypeptide comprises the amino acid modifications T350V, L351Y, 5400R, F405A and Y407V, and the second CH3 domain polypeptide comprises the amino acid modifications T350V, T366L, N390E, K392M and T394W. In some embodiments, the first CH3 domain polypeptide comprises the amino acid modifications T350V, L351Y, S400E, F405A and Y407V, and the second CH3 domain polypeptide comprises the amino acid modifications T350V, T366L, N390R, K392L and T394W. In some embodiments, the first CH3 domain polypeptide comprises the amino acid modifications T350V, L351Y, S400E, F405A and Y407V, and the second CH3 domain polypeptide comprises the amino acid modifications T350V, T366L, N390R, K392F and T394W.

[0386] In some embodiments, an isolated heteromultimer comprising a heterodimeric CH3 domain comprising a first CH3 domain polypeptide and a second CH3 domain polypeptide, the first CH3 domain polypeptide comprising amino acid modifications at positions F405 and Y407, and the second CH3 domain polypeptide comprising amino acid modifications at positions T366 and T394, wherein: (i) the first CH3 domain polypeptide further comprises an amino acid modification at position L351, and (ii) the second CH3 domain polypeptide further comprises an amino acid modification at position K392, wherein the amino acid modification at position F405 is F405A, F405T, F405S or F405V; and the amino acid modification at position Y407 is Y407V, Y407A, Y407L or Y407I; the amino acid modification at position T394 is T394W; the amino acid modification at position L351 is L351Y; the amino acid modification at position K392 is K392L, K392M, K392V or K392F, and the amino acid modification at position T366 is T366I, T366L, T366M or T366V, wherein the heterodimeric CH3 domain has a melting temperature (Tm) of about 70° C. or greater and a purity greater than about 90%, and wherein the numbering of amino acid residues is according to the EU index as set forth in Kabat.

[0387] In some embodiments, the Linker Region A comprises a first CH3 domain polypeptide and a t Linker Region B comprises a second CH3 domain polypeptide, wherein the first CH3 domain polypeptide comprising amino acid modifications at positions F405 and Y407, and the second CH3 domain polypeptide comprising amino acid modifications at positions T366 and T394, wherein: (i) the first CH3 domain polypeptide further comprises an amino acid modification at position L351, and (ii) the second CH3 domain polypeptide further comprises an amino acid modification at position K392, wherein the amino acid modification at position F405 is F405A, F405T, F405S or F405V; and the amino acid modification at position Y407 is Y407V, Y407A, Y407L or Y407I; the amino acid modification at position T394 is T394W; the amino acid modification at position L351 is L351Y; the amino acid modification at position K392 is K392L, K392M, K392V or K392F, and the amino acid modification at position T366 is T366I, T366L, T366M or T366V, wherein the heterodimeric CH3 domain has a melting temperature (Tm) of about 70 C. or greater and a purity greater than about 90%, and wherein the numbering of amino acid residues is according to the EU index as set forth in Kabat. In some embodiments, the amino acid modification at position F405 is F405A. In some embodiments, the amino acid modification at position T366 is T366I or T366L. In some embodiments, the amino acid modification at position Y407 is Y407V. In some embodiments, the amino acid modification at position F405 is F405A, the amino acid modification at position Y407 is Y407V, the amino acid modification at position T366 is T366I or T366L, and the amino acid modification at position K392 is K392L or K392M. In some embodiments, the amino acid modification at position F405 is F405A, the amino acid modification at position Y407 is Y407V, the amino acid modification at position T366 is T366L, and the amino acid modification at position K392 is K392M. In some embodiments, the amino acid modification at position F405 is F405A, the amino acid modification at position Y407 is Y407V, the amino acid modification at position T366 is T366L, and the amino acid modification at position K392 is K392L. In some embodiments, the amino acid modification at position F405 is F405A, the amino acid modification at position Y407 is Y407V, the amino acid modification at position T366 is T366I, and the amino acid modification at position K392 is K392M. In some embodiments, the amino acid modification at position F405 is F405A, the amino acid modification at position Y407 is Y407V, the amino acid modification at position T366 is T366I, and the amino acid modification at position K392 is K392L. In some embodiments, the first CH3 domain polypeptide further comprises an amino acid modification at position 5400 selected from S400D and S400E, and the second CH3 domain polypeptide further comprises the amino acid modification N390R. In some embodiments, the amino acid modification at position F405 is F405A, the amino acid modification at position Y407 is Y405V, the amino acid modification at position 5400 is S400E, the amino acid modification at position T366 is T366L, and the amino acid modification at position K392 is K392M.

[0388] In some embodiments, the modified first and second CH3 domains are comprised by an Fc construct based on a type G immunoglobulin (IgG). The IgG can be an IgG1, IgG2, IgG3, or IgG4.

[0389] Other Linker Region A and Linger Region B comprising variant CH3 domains are described in U.S. Pat. Nos. 9,499,634 and 9,562,109, each of which is incorporated by reference in its entirety.

[0390] A Linker Region A and Linker Region B can be complementary fragments of a protein, e.g., a naturally occurring protein such as human serum albumin. In embodiments, one of Linker Region A and Linker Region B comprises a first, e.g., an N-terminal fragment of the protein, e.g., hSA, and the other comprises a second, e.g., a C-terminal fragment of the protein, e.g., has. In an embodiment the fragments comprise an N-terminal and a C-terminal fragment. In an embodiment the fragments comprise two internal fragments. Typically the fragments do not overlap. In an embodiment the first and second fragment, together, provide the entire sequence of the original protein, e.g., hSA. The first fragment provides a N-terminus and a C-terminus for linking, e.g., fusing, to other sequences, e.g., sequences of R1, R2, R3, or R4 (as defined herein). The Linker Region A and the Linker Region B can be derived from albumin polypeptide.

[0391] In some embodiments, the albumin polypeptide is selected from native human serum albumin polypeptide and human alloalbumin polypeptide. The albumin polypeptide can be modified such that the Linker Region A and Linker Region B interact with one another to form heterodimers. Examples of modified albumin polypeptides are described in U.S. Pat. Nos. 9,388,231 and 9,499,605, each of which is hereby incorporated by reference in its entirety.

Accordingly, provided herein are multifunctional heteromultimer proteins of the formula R1-Linker Region A-R2 and R3-Linker Region B-R4, wherein the Linker Region A and Linker Region B form a heteromultimer. In some embodiments, the Linker Region A comprises a first polypeptide and the Linker Region B comprises a second polypeptide; wherein each of said first and second polypeptides comprises an amino acid sequence comprising a segment of an albumin polypeptide selected from native human serum albumin polypeptide and human alloalbumin polypeptide; wherein said first and second polypeptides are obtained by segmentation of said albumin polypeptide at a segmentation site, such that the segmentation results in a deletion of zero to 3 amino acid residues at the segmentation site; wherein said first polypeptide comprises at least one mutation selected from A194C, L198C, W214C, A217C, L331C and A335C, and said second polypeptide comprises at least one mutation selected from L331C, A335C, V343C, L346C, A350C, V455C, and N458C; and wherein said first and second polypeptides self-assemble to form a quasi-native structure of the monomeric form of the albumin polypeptide.

[0392] In some embodiments, the segmentation site resides on a loop of the albumin polypeptide that has a high solvent accessible surface area (SASA) and limited contact with the rest of the albumin structure. In some embodiments, the segmentation results in a complementary interface between the transporter polypeptides. These segmentation sites are described, for example, in U.S. Pat. No. 9,388,231, which is hereby incorporated by reference in its entirety.

[0393] In some embodiments, the first polypeptide comprises residues 1-337 or residues 1-293 of the albumin polypeptide with one or more of the mutations described herein. In some embodiments, the second polypeptide comprises residues of 342-585 or 304-585 of the albumin polypeptide with one or more of the mutations described herein. In some embodiments, the first polypeptide comprises residues 1-339, 1-300, 1-364, 1-441, 1-83, 1-171, 1-281, 1-293, 1-114, 1-337, or 1-336 of the albumin protein. In some embodiments, the second polypeptide comprises residues 301-585, 365-585, 442-585, 85-585, 172-585, 282-585, or 115-585, 304-585, 340-585, or 342-585 of the albumin protein.

[0394] In some embodiments, the first and second polypeptide comprise the residues of the albumin protein as shown in the table below. The sequence of the albumin protein is described below.

| First Polypeptide Residues | Second Polypeptide Residues |
|---|---|
| 1-300 | 301-585 |
| 1-364 | 365-585 |
| 1-441 | 442-585 |
| 1-83 | 85-585 |
| 1-171 | 172-585 |
| 1-281 | 282-585 |
| 1-114 | 115-585 |
| 1-339 | 340-585 |
| 1-337 | 342-585 |
| 1-293 | 304-585 |
| 1-336 | 342-585 |

[0395] In some embodiments, the first and second polypeptides comprise a linker that can form a covalent bond with one another, such as a disulfide bond. A non-limiting example of the linker is a peptide linker. In some embodiments, the peptide linker comprises GGGGS (SEQ ID NO: 23). The linker can be fused to the C-terminus of the first polypeptide and the N-terminus of the second polypeptide. The linker can also be used to attach the moieties described herein without abrogating the ability of the linkers to form a disulfide bond. In some embodiments, the first and second polypeptides do not comprise a linker that can form a covalent bond. In some embodiments, the first and second polypeptides have the following substitutions.

| First Polypeptide Substitution | Second Polypeptide Substitution |
|---|---|
| A217C | V343C |
| L331C | A350C |
| A217C | L346C |
| W214C | V343C |
| A335C | L346C |
| L198C | V455C |
| A217C | A335C |
| A217C | L331C |
| L198C | N458C |
| A194C | V455C |

[0396] The sequence of the albumin polypeptide can be the sequence of human albumin as shown, in the post-protein form with the N-terminal signaling residues removed

(human albumin, SEQ ID NO: 42)
(MKWVTFISLLFLFSSAYSRGVFRR)
[sequence omitted]

[0397] In some embodiments, the Linker Region A and the Linker Region B form a heterodimer as described herein.

[0398] In some embodiments, the polypeptide comprises at the N-terminus an antibody comprised of F(ab′)2 on an IgG1 Fc backbone fused with scFvs on the C-terminus of the IgG Fc backbone. In some embodiments, the IgG Fc backbone is a IgG1 Fc backbone. In some embodiments, the IgG1 backbone is replaced with a IgG4 backbone, IgG2 backbone, or other similar IgG backbone. The IgG backbones described in this paragraph can be used throughout this application where a Fc region is referred to as part of the therapeutic compound. Thus, in some embodiments, the antibody comprised of F(ab′)2 on an IgG1 Fc backbone can be an anti-MAdCAM antibody or an anti-PD-1 antibody on an IgG1 Fc or any other targeting moiety or effector binding/modulating moiety provided herein. In some embodiments, the The scFV segments fused to the C-terminus could be an anti-PD-1 antibody, if the N-terminus region is an anti-MAdCAM antibody, or anti-MAdCAM antibody, if the N-terminus region is an anti-PD-1 antibody. In this non-limiting example, the N-terminus can be the targeting moiety, such as any one of the ones provided for herein, and the C-terminus can be the effector binding/modulating moiety, such as any of the ones provided for herein. Alternatively, in some embodiments, the N-terminus can be the effector binding/modulating moiety, such as any one of the ones provided for herein, and the C-terminus can be the targeting moiety, such as any of the ones provided for herein.

[0399] In some embodiments, the N-terminus can be the targeting moiety, such as any one of the ones provided for herein, and the C-terminus can be the effector binding/modulating moiety, such as any of the ones provided for herein.

[0400] In some embodiments, the therapeutic compound comprises two polypeptides that homodimerize. In some embodiments, the N-terminus of the polypeptide comprises an effector binding/modulating moiety that is fused to a human IgG1 Fc domain (e.g., CH2 and/or CH3 domains). In some embodiments, the C-terminus of the Fc domain is another linker that is fused to the targeting moiety. Thus, in some embodiments, the molecule could be represented using the formula of R1-Linker A-Fc Region-Linker B-R2, wherein R1 can be an effector binding/modulating moiety, R2 is a targeting moiety, Linker A and Linker B are independently linkers as provided for herein. In some embodiments, Linker 1 and Linker 2 are different.

[0401] In some embodiments, the molecule could be represented using the formula of R1-Linker A-Fc Region-Linker B-R2, wherein R1 can be a targeting moiety, R2 is an effector binding/modulating moiety, Linker A and Linker B are independently linkers as provided for herein. In some embodiments, Linker A and Linker B are different. The linkers can be chosen from the non-limiting examples provided for herein. In some embodiments, R1 and R2 are independently selected from F(ab′)2 and scFV antibody domains. In some embodiments, R1 and R2 are different antibody domains. In some embodiments, the scFV is in the VL-VH domain orientation.

[0402] In some embodiments, the therapeutic compound is a bispecific antibody. In some embodiments, the bispecific antibodies are comprised of four polypeptide chains comprising the following:

[0403] Chain 1: nt-VH1-CH1-CH2-CH3-Linker A-scFv[VL2-Linker B-VH2]-ct

[0404] Chain 2: nt-VH1-CH1-CH2-CH3-Linker A-scFv[VL2-Linker B-VH2]-ct

[0405] Chain 3: nt-VL1-CL-ct

[0406] Chain 4: nt-VL1-CL-ct,

[0407] wherein chains 1 and 2 are identical to each other, and chains 3 and 4 are identical to each other,

[0408] wherein chain 1 forms a homodimer with chain 2; and chain 3 and 4 associate with chain 1 and chain 2. That is, when each light chain associates with each heavy chain, VL1 associates with VH1 and CL associates with CH1 to form two functional Fab units. Without being bound to any particular theory, each scFv unit is intrinsically functional since VL2 and VH2 are covalently linked in tandem with a linker as provided herein (e.g., GGGGS (SEQ ID NO: 23), GGGGSGGGGSGGGGSGGGGS (SEQ ID NO: 22), or GGGGSGGGGSGGGGS (SEQ ID NO: 30). The sequences of Linker A and Linker B, which are independent of one another can be the same or different and as otherwise described throughout the present application. Thus, in some embodiments, Linker A comprises GGGGS (SEQ ID NO: 23), or two repeats thereof, GGGGSGGGGSGGGGS (SEQ ID NO: 30), or GGGGSGGGGSGGGGSGGGGS (SEQ ID NO: 22). In some embodiments, Linker B comprises GGGGS (SEQ ID NO: 23), or two repeats thereof, GGGGSGGGGSGGGGS (SEQ ID NO: 30), or GGGGSGGGGSGGGGSGGGGS (SEQ ID NO: 22). The scFv may be arranged in the NT-VH2-VL2-CT or NT-VL2-VH2-CT orientation. NT or nt stands for N-terminus and CT or ct stands for C-terminus of the protein. CH1, CH2, and CH3 are the domains from the IgG Fc region, and CL stands for Constant Light chain, which can be either kappa or lambda family light chains. The other definitions stand for the way they are normally used in the art.

[0409] In some embodiments, the VH1 and VL1 domains are derived from the effector molecule and the VH2 and VL2 domains are derived from the targeting moiety. In some embodiments the VH1 and VL1 domains are derived from a targeting moiety and the VH2 and VL2 domains are derived from an effector binding/modulating moiety.

[0410] In some embodiments, the VH1 and VL1 domains are derived from an anti-PD-1 antibody, and the VH2 and VL2 domains are derived from an anti-MAdCAM antibody. In some embodiments the VH1 and VL1 domains are derived from an anti-MAdCAM antibody and the VH2 and VL2 domains are derived from an anti-PD-1 antibody.

[0411] In some embodiments, Linker A comprises 1, 2, 3, 4, or 5 GGGGS (SEQ ID NO: 23) repeats. In some embodiments, Linker B comprises 1, 2, 3, 4, or 5 GGGGS (SEQ ID NO: 23) repeats. For the avoidance of doubt, the sequences of Linker A and Linker B, which are used throughout this application, are independent of one another. Therefore, in some embodiments, Linker A and Linker B can be the same or different. In some embodiments, Linker A comprises GGGGS (SEQ ID NO: 23), or two repeats thereof, GGGGSGGGGSGGGGS (SEQ ID NO: 30), or GGGGSGGGGSGGGGSGGGGS (SEQ ID NO: 22). In some embodiments, Linker B comprises GGGGS (SEQ ID NO: 23), or two repeats thereof, GGGGSGGGGSGGGGS (SEQ ID NO: 30), or GGGGSGGGGSGGGGSGGGGS (SEQ ID NO: 22).

[0412] In some embodiments, the therapeutic compound comprises a light chain and a heavy chain. In some embodiments, the light and heavy chain begin at the N-terminus with the VH domain of a targeting moiety followed by the CH1 domain of a human IgG1, which is fused to a Fc region (e.g., CH2-CH3) of human IgG1. In some embodiments, at the C-terminus of the Fc region is fused to a linker as provided herein, such as but not limited to, GGGGS (SEQ ID NO: 23), or two or three repeats thereof, or GGGGSGGGGSGGGGS (SEQ ID NO: 30). The linker can then be fused to an effector binding/modulating moiety, such as any one of the effector moieties provided for herein. The polypeptides can homodimerize because through the heavy chain homodimerization, which results in a therapeutic compound having two effector moieties, such as two anti-PD-1 antibodies. In this orientation, the targeting moiety is an IgG format, there are two Fab arms that each recognize binding partner of the targeting moiety, for example, MAdCAM being bound by the anti-MAdCAM targeting moiety.

[0413] In some embodiments, the therapeutic or polypeptide comprises an antibody (targeting moiety) with a variable heavy chain and a variable light chain, in an IgG isotype, for example, with an effector molecule, such as an IL-2 mutein. In some embodiments, the IL-2 mutein is fused at the C-terminus of the variable heavy chain. This can be represented by the formula of VL and VH-IgGConstantDomain-L1-E, wherein L1 is a linker, such as a glycine/serine linker as provided herein, E is an effector molecule, such as an IL-2 mutein and VL and VH are the variable light and heavy chains. The VL domain can be a kappa domain. In some embodiments, the IgG Constant domain comprises the sequence of:

(SEQ ID NO: 44)
ASTKGPSVFPLAPSSKSTSGGTAALGCLVKDYFPEPVTVSWNSGA
LTSGVHTFPAVLQSSGLYSLSSVVTVPSSSLGTQTYICNVNHKPS
NTKVDKKVEPKSCDKTHTCPPCPAPEAAGAPSVFLFPPKPKDTLM
ISRTPEVTCVVVDVSHEDPEVKFNWYVDGVEVHNAKTKPREEQYN
STYRVVSVLTVLHQDWLNGKEYKCKVSNKALPAPIEKTISKAKGQ
PREPQVYTLPPSREEMTKNQVSLTCLVKGFYPSDIAVEWESNGQP
ENNYKTTPPVLDSDGSFFLYSKLTVDKSRWQQGNVFSCSVMHEAL
HNHYTQKSLSLSPG

[0414] In some embodiments, the linker comprises GGGGS. In some embodiments, the IL-2 mutein comprises the IL-2 muteins provided herein, such as one of SEQ ID NOs: 31-41, which can also have a Fc molecule appended to the N- or C-terminus of the IL-2 mutein. The Fc domain can comprise SEQ ID NO: 21 or 43. In some embodiments, the IL-2 mutein comprises one of SEQ ID NO: 47-60. In some embodiments, the IL-2 mutein comprises SEQ ID NO: 41 or SEQ ID NO: 56. In some embodiments, the IL-2 mutein comprises SEQ ID NO: 40 or SEQ ID NO: 55.

[0415] In some embodiments, the targeting moiety is a MAdCAM antibody.

[0416] In some embodiments, the MAdCAM antibody is selected from the following table:

TABLE 1
MAdCAM antibody

| Clone | HCDR | HCDR | HCDR | | | | |
|---|---|---|---|---|---|---|---|
| ID | 1 | 2 | 3 | LCDR1 | LCDR2 | LCDR3 | scFv |
| 1. | FTFS | AVIS | CTTS | QASQDI | AASSLQS | CQQGYSTPLTF | EVQLLESGGGLVQPGGSLRLSCAA |
| | SYGM | DDGS | KYYY | SKSLN | (SEQ ID | (SEQ ID NO: | SGFTFSSYGMHWVRQAPGKGLEWV |
| | H | DKYY | YYGM | (SEQ | NO: 65) | 66) | AVISDDGSDKYYADSVKGRFTISR |
| | (SEQ | A | DVW | ID NO: | | | DNSKNTLYLQMNSLRAEDTAVYYC |
| | ID | (SEQ | (SEQ | 64) | | | TTSKYYYYYGMDVWGQGTTVTVSS |
| | NO: | ID | ID | | | | GGGGSGGGGSGGGGSGGGGSDIQM |
| | 61) | NO: | NO: | | | | TQSPSSLSASVGDRVTITCQASQD |
| | | 62) | 63) | | | | ISKSLNWYQQKPGKAPKLLIYAAS |
| | | | | | | | SLQSGVPSRFSGSGSGTDFTLTIS |
| | | | | | | | SLQPEDFATYYCQQGYSTPLTFGG |
| | | | | | | | GTKVEIK (SEQ ID NO: 67) |
| 2. | YPFI | GUN | CARE | RASQSI | GASTLES | CQQTWGPPFTF | QVQLVQSGAEVKKPGASVKVSCKA |
| | GYYL | PS GG | GRLS | SSYLA | (SEQ ID | (SEQ ID NO: | SGYPFIGYYLHWVRQAPGQGLEWM |
| | H | STSY | YGMD | (SEQ | NO: 72) | 73) | GIINPSGGSTSYAQKFQGRVTMTR |
| | (SEQ | A | AW | ID NO: | | | DTSTSTVYMELSSLRSEDTAVYYC |
| | ID | (SEQ | (SEQ | 71) | | | AREGRLSYGMDAWGQGTLVTVSSG |
| | NO: | ID | ID | | | | GGGSGGGGSGGGGSGGGGSDIQMT |
| | 68) | NO: | NO: | | | | QSPSSLSASVGDRVTITCRASQSI |
| | | 69) | 70) | | | | SSYLAWYQQKPGKAPKLLIYGAST |
| | | | | | | | LESGVPSRFSGSGSGTDFTLTISS |
| | | | | | | | LQPEDFATYYCQQTWGPPFTFGQG |
| | | | | | | | TKLEIK (SEQ ID NO: 74) |
| 3. | YPFI | GUN | CARE | RASQSI | GASTLES | CQQTWGPPFTF | QVQLVQSGAEVKKPGASVKVSCKA |
| | GQYL | PSGG | GRLS | SSYLA | (SEQ ID | (SEQ ID NO: | SGYPFIGQYLHWVRQAPGQGLEWM |
| | H | STSY | YGMD | (SEQ | NO: 72) | 73) | GIINPSGGSTSYAQKFQGRVTMTR |
| | (SEQ | A | AW | ID NO: | | | DTSTSTVYMELSSLRSEDTAVYYC |
| | ID | (SEQ | (SEQ | 71) | | | AREGRLSYGMDAWGQGTLVTVSSG |
| | NO: | ID | ID | | | | GGGSGGGGSGGGGSGGGGSDIQMT |
| | 75) | NO: | NO: | | | | QSPSSLSASVGDRVTITCRASQSI |
| | | 69) | 70) | | | | SSYLAWYQQKPGKAPKLLIYGAST |
| | | | | | | | LESGVPSRFSGSGSGTDFTLTISS |
| | | | | | | | LQPEDFATYYCQQTWGPPFTFGQG |
| | | | | | | | TKLEIK (SEQ ID NO: 76) |
| 4. | GTFS | GSIN | CAKD | QASQDI | AASSLQS | CQQSYSSVITF | QVQLVQSGAEVKKPGASVKVSCKA |
| | SYAI | PSGD | KAQW | SNSLN | (SEQ ID | (SEQ ID NO: | SGGTFSSYAISWVRQAPGQGLEWM |
| | S | TTSY | LVGY | (SEQ | NO: 65) | 81) | GSINPSGDTTSYAQKFQGRVTMTR |
| | (SEQ | A | FDYW | ID NO: | | | DTSTSTVYMELSSLRSEDTAVYYC |
| | ID | (SEQ | (SEQ | 80) | | | AKDKAQWLVGYFDYWGQGTLVTVS |
| | NO: | ID | ID | | | | SGGGGSGGGGSGGGGSGGGGSDIQ |
| | 77) | NO: | NO: | | | | MTQSPSSLSASVGDRVTITCQASQ |
| | | 78) | 79) | | | | DISNSLNWYQQKPGKAPKLLIYAA |
| | | | | | | | SSLQSGVPSRFSGSGSGTDFTLTI |
| | | | | | | | SSLQPEDFATYYCQQSYSSVITFG |
| | | | | | | | QGTKVEIK (SEQ ID NO: 82) |
| 5. | FTFS | SSIS | CARE | RASQGI | GASSLQS | CQQANSFPFTF | EVQLLESGGGLVQPGGSLRLSCAA |
| | SYWM | PGGS | VQLS | SNSLA | (SEQ ID | (SEQ ID NO: | SGFTFSSYWMHWVRQAPGKGLEWV |
| | H | NIDY | HYDY | (SEQ | NO: 87) | 88) | SSISPGGSNIDYADSVKGRFTISR |
| | (SEQ | A | W | ID NO: | | | DNSKNTLYLQMNSLRAEDTAVYYC |
| | ID | (SEQ | (SEQ | 86) | | | AREVQLSHYDYWGQGTLVTVSSGG |
| | NO: | ID | ID | | | | GGSGGGGSGGGGSGGGGSDIQMTQ |
| | 83) | NO: | NO: | | | | SPSSLSASVGDRVTITCRASQGIS |
| | | 84) | 85) | | | | NSLAWYQQKPGKAPKLLIYGASSL |
| | | | | | | | QSGVPSRFSGSGSGTDFTLTISSL |
| | | | | | | | QPEDFATYYCQQANSFPFTFGQGT |
| | | | | | | | KVEIK (SEQ ID NO: 89) |
| 6. | FTFN | SRIN | CARE | RASQII | GASSLQS | CQQSYRLPFTF | EVQLLESGGGLVQPGGSLRLSCAA |
| | NYAF | SYGT | GPVA | GTNLA | (SEQ ID | (SEQ ID NO: | SGFTFNNYAFHWVRQAPGKGLEWV |
| | H | STTY | GYWY | (SEQ | NO: 87) | 94) | SRINSYGTSTTYADSVKGRFTISR |
| | (SEQ | A | FDLW | ID NO: | | | DNSKNTLYLQMNSLRAEDTAVYYC |
| | ID | (SEQ | (SEQ | 93) | | | AREGPVAGYWYFDLWGQGTLVTVS |
| | NO: | ID | ID | | | | SGGGGSGGGGSGGGGSGGGGSDIQ |
| | 90) | NO: | NO: | | | | MTQSPSSLSASVGDRVTITCRASQ |
| | | 91) | 92) | | | | IIGTNLAWYQQKPGKAPKLLIYGA |
| | | | | | | | SSLQSGVPSRFSGSGSGTDFTLTI |
| | | | | | | | SSLQPEDFATYYCQQSYRLPFTFG |
| | | | | | | | QGTKVEIK (SEQ ID NO: 95) |
| 7. | YTFT | GUN | CAKD | RASQNI | AASSLQS | CQQSYTTPYTF | QVQLVQSGAEVKKPGASVKVSCKA |
| | GYHI | PSGG | WSSW | SSSLN | (SEQ ID | (SEQ ID NO: | SGYTFTGYHIHWVRQAPGQGLEWM |
| | H | STIY | YLGP | (SEQ | NO: 65) | 100) | GIINPSGGSTIYAQKFQGRVTMTR |
| | (SEQ | A | FDYW | ID NO: | | | DTSTSTVYMELSSLRSEDTAVYYC |
| | ID | (SEQ | (SEQ | 99) | | | AKDWSSWYLGPFDYWGQGTLVTVS |
| | NO: | ID | ID | | | | SGGGGSGGGGSGGGGSGGGGSDIQ |
| | 96) | NO: | NO: | | | | MTQSPSSLSASVGDRVTITCRASQ |
| | | 97) | 98) | | | | NISSSLNWYQQKPGKAPKLLIYAA |
| | | | | | | | SSLQSGVPSRFSGSGSGTDFTLTI |
| | | | | | | | SSLQPEDFATYYCQQSYTTPYTFG |
| | | | | | | | QGTKVEIK (SEQ ID NO: |
| | | | | | | | 101) |
| 8. | FMFG | SAIS | CAKD | RASQGI | DASSLES | CQQTHSFPSTF | EVQLLESGGGLVQPGGSLRLSCAA |
| | DYAM | GSGG | LWA | SNNLN | (SEQ ID | (SEQ ID NO: | SGFMFGDYAMHWVRQAPGKGLEWV |
| | H | STYY | GIWY | (SEQ | NO: | 107) | SAISGSGGSTYYADSVKGRFTISR |
| | (SEQ | A | FDLW | ID NO: | 106) | | DNSKNTLYLQMNSLRAEDTAVYYC |
| | ID | (SEQ | (SEQ | 105) | | | AKDLVVAGIWYFDLWGRGTLVTVS |
| | NO: | ID | ID | | | | SGGGGSGGGGSGGGGSGGGGSDIQ |
| | 102) | NO: | NO: | | | | MTQSPSSLSASVGDRVTITCRASQ |
| | | 103) | 104) | | | | GISNNLNWYQQKPGKAPKLLIYDA |
| | | | | | | | SSLESGVPSRFSGSGSGTDFTLTI |
| | | | | | | | SSLQPEDFATYYCQQTHSFPSTFG |
| | | | | | | | QGTKLEIK (SEQ ID NO: |
| | | | | | | | 108) |
| 9. | FTFS | SVIG | CAAD | RASQGI | AASTLQS | CQQSYSTPWTF | EVQLLESGGGLVQPGGSLRLSCAA |
| | DYYM | ESGG | PVSR | SSSLA | (SEQ ID | (SEQ ID NO: | SGFTFSDYYMNWVRQAPGKGLEWV |
| | N | STYY | WPKH | (SEQ | NO: | 114) | SVIGESGGSTYYADSVKGRFTISR |
| | (SEQ | A | GGGD | ID NO: | 113) | | DNSKNTLYLQMNSLRAEDTAVYYC |
| | ID | (SEQ | YW | 112) | | | AADPVSRWPKHGGGDYWGQGTLVT |
| | NO: | ID | (SEQ | | | | VSSGGGGSGGGGSGGGGSGGGGSD |
| | 109) | NO: | ID | | | | IQMTQSPSSLSASVGDRVTITCRA |
| | | 110) | NO: | | | | SQGISSSLAWYQQKPGKAPKLLIY |
| | | | 111) | | | | AASTLQSGVPSRFSGSGSGTDFTL |
| | | | | | | | TISSLQPEDFATYYCQQSYSTPWT |
| | | | | | | | FGQGTKVEIK (SEQ ID NO: |
| | | | | | | | 115) |
| 10. | YTLT | GWIN | CAKG | RASDNI | AASSLQS | CQQGYSTPPTF | QVQLVQSGAEVKKPGASVKVSCKA |
| | TWYM | PNRG | DLWG | GSWLA | (SEQ ID | (SEQ ID NO: | SGYTLTTWYMYWVRQAPGQGLEWM |
| | Y | ATNY | AMDV | (SEQ | NO: 65) | 120) | GWINPNRGATNYAQKFQGRVTMTR |
| | (SEQ | A | W | ID NO: | | | DTSTSTVYMELSSLRSEDTAVYYC |
| | ID | (SEQ | (SEQ | 119) | | | AKGDLWGAMDVWGQGTLVTVSSGG |
| | NO: | ID | ID | | | | GGSGGGGSGGGGSGGGGSDIQMTQ |
| | 116) | NO: | NO: | | | | SPSSLSASVGDRVTITCRASDNIG |
| | | 117) | 118) | | | | SWLAWYQQKPGKAPKLLIYAASSL |
| | | | | | | | QSGVPSRFSGSGSGTDFTLTISSL |
| | | | | | | | QPEDFATYYCQQGYSTPPTFGQGT |
| | | | | | | | KVEIK (SEQ ID NO: 121) |
| 11. | YTFT | GGFD | CARH | RASESI | AASTLQS | CQQSYSVPFTF | QVQLVQSGAEVKKPGASVKVSCKA |
| | TYYM | PEDG | AVAG | SNWLA | (SEQ ID | (SEQ ID NO: | SGYTFTTYYMHWVRQAPGQGLEWM |
| | H | ETIY | AVGA | (SEQ | NO: | 126) | GGFDPEDGETIYAQKFQGRVTMTR |
| | (SEQ | A | GYYY | ID NO: | 113) | | DTSTSTVYMELSSLRSEDTAVYYC |
| | ID | (SEQ | YGMD | 125) | | | ARHAVAGAVGAGYYYYGMDVWGQG |
| | NO: | ID | VW | | | | TMVTVSSGGGGSGGGGSGGGGSGG |
| | 122) | NO: | (SEQ | | | | GGSDIQMTQSPSSLSASVGDRVTI |
| | | 123) | ID | | | | TCRASESISNWLAWYQQKPGKAPK |
| | | | NO: | | | | LLIYAASTLQSGVPSRFSGSGSGT |
| | | | 124) | | | | DFTLTISSLQPEDFATYYCQQSYS |
| | | | | | | | VPFTFGPGTKVDIK (SEQ ID |
| | | | | | | | NO: 127) |
| 12. | YTFT | GWIG | CARD | RSSQSL | SSSNRAP | CMQALHIPLTF | QVQLVQSGAEVKKPGASVKVSCKA |
| | GYYM | PNSG | LDHN | LHSNGY | (SEQ ID | (SEQ ID NO: | SGYTFTGYYMHWVRQAPGQGLEWM |
| | H | DTNY | WYFD | NYLD | NO: | 133) | GWIGPNSGDTNYAQKFQGRVTMTR |
| | (SEQ | A | LW | (SEQ | 132) | | DTSTSTVYMELSSLRSEDTAVYYC |
| | ID | (SEQ | (SEQ | ID NO: | | | ARDLDHNWYFDLWGRGTLVTVSSG |
| | NO: | ID | ID | 131) | | | GGGSGGGGSGGGGSGGGGSDIVMT |
| | 128) | NO: | NO: | | | | QSPLSLPVTPGEPASISCRSSQSL |
| | | 129) | 130) | | | | LHSNGYNYLDWYLQKPGQSPQLLI |
| | | | | | | | YSSSNRAPGVPDRFSGSGSGTDFT |
| | | | | | | | LKISRVEAEDVGVYYCMQALHIPL |
| | | | | | | | TFGGGTKVEIK (SEQ ID NO: |
| | | | | | | | 134) |
| 13. | FTFD | SYID | CAKD | QASQDI | KASTLES | CQQSYSTPITF | EVQLLESGGGLVQPGGSLRLSCAA |
| | DYAM | ASGT | QAAA | SNYLN | (SEQ ID | (SEQ ID NO: | SGFTFDDYAMHWVRQAPGKGLEWV |
| | H | TIYY | GYWY | (SEQ | NO: | 140) | SYIDASGTTIYYADSVKGRFTISR |
| | (SEQ | A | FDLW | ID NO: | 139) | | DNSKNTLYLQMNSLRAEDTAVYYC |
| | ID | (SEQ | (SEQ | 138) | | | AKDQAAAGYWYFDLWGRGTLVTVS |
| | NO: | ID | ID | | | | SGGGGSGGGGSGGGGSGGGGSDIQ |
| | 135) | NO: | NO: | | | | MTQSPSSLSASVGDRVTITCQASQ |
| | | 136) | 137) | | | | DISNYLNWYQQKPGKAPKLLIYKA |
| | | | | | | | STLESGVPSRFSGSGSGTDFTLTI |
| | | | | | | | SSLQPEDFATYYCQQSYSTPITFG |
| | | | | | | | QGTRLEIK (SEQ ID NO: |
| | | | | | | | 141) |
| 14. | YTFT | GGIV | CAKD | RSSQSL | SAYNRAS | CMQALQTPLTF | QVQLVQSGAEVKKPGSSVKVSCKA |
| | DYHI | PRSG | ESSG | LHSNGY | (SEQ ID | (SEQ ID NO: | SGYTFTDYHIHWVRQAPGQGLEWM |
| | H | STTY | WYYF | NYLD | NO: | 146) | GGIVPRSGSTTYAQKFQGRVTITA |
| | (SEQ | A | DYW | (SEQ | 145) | | DESTSTAYMELSSLRSEDTAVYYC |
| | ID | (SEQ | (SEQ | ID NO: | | | AKDESSGWYYFDYWGQGTLVTVSS |
| | NO: | ID | ID | 131) | | | GGGGSGGGGSGGGGSGGGGSDIVM |
| | 142) | NO: | NO: | | | | TQSPLSLPVTPGEPASISCRSSQS |
| | | 143) | 144) | | | | LLHSNGYNYLDWYLQKPGQSPQLL |
| | | | | | | | IYSAYNRASGVPDRFSGSGSGTDF |
| | | | | | | | TLKISRVEAEDVGVYYCMQALQTP |
| | | | | | | | LTFGQGTKVEIK (SEQ ID NO: |
| | | | | | | | 147) |
| 15. | YTFT | GGII | CAKG | QANQDI | RASKLEA | CQQSSEIPYSF | QVQLVQSGAEVKKPGSSVKVSCKA |
| | NYYM | PIVD | RYTV | SNYLN | (SEQ ID | (SEQ ID NO: | SGYTFTNYYMHWVRQAPGQGLEWM |
| | H | RVKY | NYYY | (SEQ | NO: | 153) | GGIIPIVDRVKYAQKFQGRVTITA |
| | (SEQ | A | GMDV | ID NO: | 152) | | DESTSTAYMELSSLRSEDTAVYYC |
| | ID | (SEQ | W | 151) | | | AKGRYTVNYYYGMDVWGQGTTVTV |
| | NO: | ID | (SEQ | | | | SSGGGGSGGGGSGGGGSGGGGSDI |
| | 148) | NO: | ID | | | | QMTQSPSSLSASVGDRVTITCQAN |
| | | 149) | NO: | | | | QDISNYLNWYQQKPGKAPKLLIYR |
| | | | 150) | | | | ASKLEAGVPSRFSGSGSGTDFTLT |
| | | | | | | | ISSLQPEDFATYYCQQSSEIPYSF |
| | | | | | | | GQGTKLEIK (SEQ ID NO: |
| | | | | | | | 154) |
| 16. | FTFE | SYLN | CAKD | RASQSI | DASNLET | CQQSYTIPITF | EVQLLESGGGLVQPGGSLRLSCAA |
| | DYAM | SDGG | YCTN | STYLN | (SEQ ID | (SEQ ID NO: | SGFTFEDYAMHWVRQAPGKGLEWV |
| | H | STSY | GVCA | (SEQ | NO: | 160) | SYLNSDGGSTSYADSVKGRFTISR |
| | (SEQ | A | FDYW | ID NO: | 159) | | DNSKNTLYLQMNSLRAEDTAVYYC |
| | ID | (SEQ | (SEQ | 158) | | | AKDYCTNGVCAFDYWGQGTLVTVS |
| | NO: | ID | ID | | | | SGGGGSGGGGSGGGGSGGGGSDIQ |
| | 155) | NO: | NO: | | | | MTQSPSSLSASVGDRVTITCRASQ |
| | | 156) | 157) | | | | SISTYLNWYQQKPGKAPKLLIYDA |
| | | | | | | | SNLETGVPSRFSGSGSGTDFTLTI |
| | | | | | | | SSLQPEDFATYYCQQSYTIPITFG |
| | | | | | | | QGTRLEIK (SEQ ID NO: |
| | | | | | | | 161) |
| 17. | FTFS | SAIS | CVSD | RASQSI | AASRLEG | CQQANSFPLTF | EVQLLESGGGLVQPGGSLRLSCAA |
| | DSAM | GSGS | IAVA | STFLN | (SEQ ID | (SEQ ID NO: | SGFTFSDSAMHWVRQAPGKGLEWV |
| | H | TIYY | GHWY | (SEQ | | 167) | SAISGSGSTIYYADSVKGRFTISR |
| | (SEQ | A | FDLW | ID NO: | NO: | | DNSKNTLYLQMNSLRAEDTAVYYC |
| | ID | (SEQ | (SEQ | 165) | 166) | | VSDIAVAGHWYFDLWGRGTLVTVS |
| | NO: | ID | ID | | | | SGGGGSGGGGSGGGGSGGGGSDIQ |
| | 162) | NO: | NO: | | | | MTQSPSSLSASVGDRVTITCRASQ |
| | | 163) | 164) | | | | SISTFLNWYQQKPGKAPKLLIYAA |
| | | | | | | | SRLEGGVPSRFSGSGSGTDFTLTI |
| | | | | | | | SSLQPEDFATYYCQQANSFPLTFG |
| | | | | | | | PGTKVDIK (SEQ ID NO: |
| | | | | | | | 168) |
| 18. | FTFS | SYIS | CARA | RASQSI | AASSLQS | CQQSYSTPLTF | EVQLVESGGGLVKPGGSLRLSCAA |
| | SYWM | GDSG | NSSG | SSYLN | (SEQ ID | (SEQ ID NO: | SGFTFSSYWMSWVRQAPGKGLEWV |
| | S | YTNY | WYDW | (SEQ | NO: 65) | 173) | SYISGDSGYTNYAAPVKGRFTISR |
| | (SEQ | A | YFDL | ID NO: | | | DDSKNTLYLQMNSLKTEDTAVYYC |
| | ID | (SEQ | W | 172) | | | ARANSSGWYDWYFDLWGRGTLVTV |
| | NO: | ID | (SEQ | | | | SSGGGGSGGGGSGGGGSGGGGSDI |
| | 169) | NO: | ID | | | | QMTQSPSSLSASVGDRVTITCRAS |
| | | 170) | NO: | | | | QSISSYLNWYQQKPGKAPKLLIYA |
| | | | 171) | | | | ASSLQSGVPSRFSGSGSGTDFTLT |
| | | | | | | | ISSLQPEDFATYYCQQSYSTPLTF |
| | | | | | | | GGGTKVEIK (SEQ ID NO: |
| | | | | | | | 174) |
| 19. | FTFD | SGIS | CAKD | QASQDI | DASNLET | CQQSYSTPLTF | EVQLLESGGGLVQPGGSLRLSCAA |
| | DYAM | WNSG | IVAA | SNYLN | (SEQ ID | (SEQ ID NO: | SGFTFDDYAMHWVRQAPGKGLEWV |
| | H | SIGY | GHYY | (SEQ | NO: | 173) | SGISWNSGSIGYADSVKGRFTISR |
| | (SEQ | A | YGMD | ID NO: | 159) | | DNSKNTLYLQMNSLRAEDTAVYYC |
| | ID | (SEQ | VW | 138) | | | AKDIVAAGHYYYGMDVWGQGTTVT |
| | NO: | ID | (SEQ | | | | VSSGGGGSGGGGSGGGGSGGGGSD |
| | 135) | NO: | ID | | | | IQMTQSPSSLSASVGDRVTITCQA |
| | | 175) | NO: | | | | SQDISNYLNWYQQKPGKAPKLLIY |
| | | | 176) | | | | DASNLETGVPSRFSGSGSGTDFTL |
| | | | | | | | TISSLQPEDFATYYCQQSYSTPLT |
| | | | | | | | FGGGTKVEIK (SEQ ID NO: |
| | | | | | | | 177) |
| 20. | FTFD | SYID | CARD | QAGQDI | DASNLET | CQQTYSTPITF | EVQLLESGGGLVQPGGSLRLSCAA |
| | DYAM | TSSS | EAAA | SNYLN | (SEQ ID | (SEQ ID NO: | SGFTFDDYAMHWVRQAPGKGLEWV |
| | H | HLYY | GYYG | (SEQ | NO: | 181) | SYIDTSSSHLYYADSVKGRFTISR |
| | (SEQ | A | MDVW | ID NO: | 159) | | DNSKNTLYLQMNSLRAEDTAVYYC |
| | ID | (SEQ | (SEQ | 180) | | | ARDEAAAGYYGMDVWGQGTTVTVS |
| | NO: | ID | ID | | | | SGGGGSGGGGSGGGGSGGGGSDIQ |
| | 135) | NO: | NO: | | | | MTQSPSSLSASVGDRVTITCQAGQ |
| | | 178) | 179) | | | | DISNYLNWYQQKPGKAPKLLIYDA |
| | | | | | | | SNLETGVPSRFSGSGSGTDFTLTI |
| | | | | | | | SSLQPEDFATYYCQQTYSTPITFG |
| | | | | | | | QGTKLEIK (SEQ ID NO: |
| | | | | | | | 182) |
| 21. | FTFS | STIV | CARD | RASQDI | AASSLQS | CQQSYSIPPTF | EVQLLESGGGLVQPGGSLRLSCAA |
| | NAWM | GNGG | NPLR | SNYLN | (SEQ ID | (SEQ ID NO: | SGFTFSNAWMSWVRQAPGKGLEWV |
| | S | ATYY | WQGM | (SEQ | NO: 65) | 187) | STIVGNGGATYYADSVKGRFTISR |
| | (SEQ | A | DVW | ID NO: | | | DNSKNTLYLQMNSLRAEDTAVYYC |
| | ID | (SEQ | (SEQ | 186) | | | ARDNPLRWQGMDVWGQGTLVTVSS |
| | NO: | ID | ID | | | | GGGGSGGGGSGGGGSGGGGSDIQM |
| | 183) | NO: | NO: | | | | TQSPSSLSASVGDRVTITCRASQD |
| | | 184) | 185) | | | | ISNYLNWYQQKPGKAPKLLIYAAS |
| | | | | | | | SLQSGVPSRFSGSGSGTDFTLTIS |
| | | | | | | | SLQPEDFATYYCQQSYSIPPTFGP |
| | | | | | | | GTKVDIK (SEQ ID NO: 188) |
| 22. | FTFS | SYIS | CARA | RASQSI | AASSLQS | CQQSYSTPLTF | EVQLLESGGGLVQPGGSLRLSCAA |
| | SYQM | SSST | NSSS | SSYLN | (SEQ ID | (SEQ ID NO: | SGFTFSSYQMSWVRQAPGKGLEWV |
| | S | YTNY | WYDW | (SEQ | NO: 65) | 173) | SYISSSSTYTNYADSVKGRFTISR |
| | (SEQ | A | YFDL | ID NO: | | | DNSKNTLYLQMNSLRAEDTAVYYC |
| | ID | (SEQ | W | 172) | | | ARANSSSWYDWYFDLWGQGTLVTV |
| | NO: | ID | (SEQ | | | | SSGGGGSGGGGSGGGGSGGGGSDI |
| | 189) | NO: | ID | | | | QMTQSPSSLSASVGDRVTITCRAS |
| | | 190) | NO: | | | | QSISSYLNWYQQKPGKAPKLLIYA |
| | | | 191) | | | | ASSLQSGVPSRFSGSGSGTDFTLT |
| | | | | | | | ISSLQPEDFATYYCQQSYSTPLTF |
| | | | | | | | GGGTKVEIK (SEQ ID NO: |
| | | | | | | | 192) |
| 23. | FTFS | SGIS | CATS | RASQSI | AASNLQR | CQQSYSIPITF | EVQLLESGGGLVQPGGSLRLSCAA |
| | SYAM | GSGG | QAPV | SSWLA | (SEQ ID | (SEQ ID NO: | SGFTFSSYAMHWVRQAPGKGLEWV |
| | H | SAYY | DYYY | (SEQ | NO: | 198) | SGISGSGGSAYYADSVKGRFTISR |
| | (SEQ | A | YGMD | ID NO: | 197) | | DNSKNTLYLQMNSLRAEDTAVYYC |
| | ID | (SEQ | VW | 196) | | | ATSQAPVDYYYYGMDVWGQGTTVT |
| | NO: | ID | (SEQ | | | | VSSGGGGSGGGGSGGGGSGGGGSD |
| | 193) | NO: | ID | | | | IQMTQSPSSLSASVGDRVTITCRA |
| | | 194) | NO: | | | | SQSISSWLAWYQQKPGKAPKLLIY |
| | | | 195) | | | | AASNLQRGVPSRFSGSGSGTDFTL |
| | | | | | | | TISSLQPEDFATYYCQQSYSIPIT |
| | | | | | | | FGQGTKVEIK (SEQ ID NO: |
| | | | | | | | 199) |
| 24. | FTFS | SYIS | CARV | RASQSI | AASSLQS | CQQSYSTPLTF | EVQLVESGGGLVKPGGSLRLSCAA |
| | SYWM | GSSS | GSSG | SSYLN | (SEQ ID | (SEQ ID NO: | SGFTFSSYWMSWVRQAPGKGLEWV |
| | S | YTNY | WYDW | (SEQ | NO: 65) | 173) | SYISGSSSYTNYAAPVKGRFTISR |
| | (SEQ | A | YFDL | ID NO: | | | DDSKNTLYLQMNSLKTEDTAVYYC |
| | ID | (SEQ | W | 172) | | | ARVGSSGWYDWYFDLWGRGTLVTV |
| | NO: | ID | (SEQ | | | | SSGGGGSGGGGSGGGGSGGGGSDI |
| | 169) | NO: | ID | | | | QMTQSPSSLSASVGDRVTITCRAS |
| | | 200) | NO: | | | | QSISSYLNWYQQKPGKAPKLLIYA |
| | | | 201) | | | | ASSLQSGVPSRFSGSGSGTDFTLT |
| | | | | | | | ISSLQPEDFATYYCQQSYSTPLTF |
| | | | | | | | GQGTKVEIK (SEQ ID NO: |
| | | | | | | | 202) |
| 25. | YTLT | GWIN | CAKG | RASDNI | AASSLQS | CQQGYSTPPTF | QVQLVQSGAEVKKPGASVKVSCKA |
| | TWYM | PNRG | DLWG | GSWLA | (SEQ ID | (SEQ ID NO: | SGYTLTTWYMYWVRQAPGQGLEWM |
| | Y | ATNY | AMDV | (SEQ | NO: 65) | 120) | GWINPNRGATNYAQKFQGRVTMTR |
| | (SEQ | A | W | ID NO: | | | DTSTSTVYMELSSLRSEDTAVYYC |
| | ID | (SEQ | (SEQ | 119) | | | AKGDLWGAMDVWGQGTLVTVSSGG |
| | NO: | ID | ID | | | | GGSGGGGSGGGGSGGGGSDIQMTQ |
| | 116) | NO: | NO: | | | | SPSSLSASVGDRVTITCRASDNIG |
| | | 117) | 118) | | | | SWLAWYQQKPGKAPKLLIYAASSL |
| | | | | | | | QSGVPSRFSGSGSGTDFTLTISSL |
| | | | | | | | QPEDFATYYCQQGYSTPPTFGQGT |
| | | | | | | | KVEIK (SEQ ID NO: 121) |
| 26. | YTLT | GWIN | CAKG | RASDNI | AASSLQS | CQQGYSTPPTF | QVQLVQSGAEVKKPGASVKVSCKA |
| | TWYM | PNRG | DLWG | GSWLA | (SEQ ID | (SEQ ID NO: | SGYTLTTWYMYWVRQAPGQGLEWM |
| | Y | ATNY | AMDV | (SEQ | NO: 65) | 120) | GWINPNRGATNYAQKFQGRVTMTR |
| | (SEQ | A | W | ID NO: | | | DTSTSTVYMELSSLRSEDTAVYYC |
| | ID | (SEQ | (SEQ | 119) | | | AKGDLWGAMDVWGQGTTVTVSSGG |
| | NO: | ID | ID | | | | GGSGGGGSGGGGSGGGGSDIQMTQ |
| | 116) | NO: | NO: | | | | SPSSLSASVGDRVTITCRASDNIG |
| | | 117) | 118) | | | | SWLAWYQQKPGKAPKLLIYAASSL |
| | | | | | | | QSGVPSRFSGSGSGTDFTLTISSL |
| | | | | | | | QPEDFATYYCQQGYSTPPTFGQGT |
| | | | | | | | KVEIK (SEQ ID NO: 203) |
| 27. | YTFT | GWMN | CARD | RASQSI | AASSLQS | CQQSYTAPYTF | QVQLVQSGAEVKKPGASVKVSCKA |
| | GYYI | PNSG | PGFL | SSYLH | (SEQ ID | (SEQ ID NO: | SGYTFTGYYIHWVRQAPGQGLEWM |
| | H | NTGY | GYCS | (SEQ | NO: 65) | 208) | GWMNPNSGNTGYAQKFQGRVTMTR |
| | (SEQ | A | GGSC | ID NO: | | | DTSTSTVYMELSSLRSEDTAVYYC |
| | ID | (SEQ | YDGW | 207) | | | ARDPGFLGYCSGGSCYDGWFDPWG |
| | NO: | ID | FDPW | | | | QGTLVTVSSGGGGSGGGGSGGGGS |
| | 204) | NO: | (SEQ | | | | GGGGSDIQMTQSPSSLSASVGDRV |
| | | 205) | ID | | | | TITCRASQSISSYLHWYQQKPGKA |
| | | | NO: | | | | PKLLIYAASSLQSGVPSRFSGSGS |
| | | | 206) | | | | GTDFTLTISSLQPEDFATYYCQQS |
| | | | | | | | YTAPYTFGQGTKLEIK (SEQ ID |
| | | | | | | | NO: 209) |
| 28. | YTFT | GWMN | CARE | RASQGI | DASNLET | CQQSYSTPLTF | QVQLVQSGAEVKKPGASVKVSCKA |
| | DYFL | PTSG | GEGS | NSWLA | (SEQ ID | (SEQ ID NO: | SGYTFTDYFLHWVRQAPGQGLEWM |
| | H | NTGY | GFDY | (SEQ | NO: | 173) | GWMNPTSGNTGYAQKFQGRVTMTR |
| | (SEQ | A | W | ID NO: | 159) | | DTSTSTVYMELSSLRSEDTAVYYC |
| | ID | (SEQ | (SEQ | 213) | | | AREGEGSGFDYWGQGTLVTVSSGG |
| | NO: | ID | ID | | | | GGSGGGGSGGGGSGGGGSDIQMTQ |
| | 210) | NO: | NO: | | | | SPSSLSASVGDRVTITCRASQGIN |
| | | 211) | 212) | | | | SWLAWYQQKPGKAPKLLIYDASNL |
| | | | | | | | ETGVPSRFSGSGSGTDFTLTISSL |
| | | | | | | | QPEDFATYYCQQSYSTPLTFGGGT |
| | | | | | | | KVEIK (SEQ ID NO: 214) |
| 29. | YTFT | AWMN | CARD | RASQGI | AASSLQS | CQQSYSTPWTF | QVQLVQSGAEVKKPGASVKVSCKA |
| | SYYM | PNSG | YDFW | SNYLA | (SEQ ID | (SEQ ID NO: | SGYTFTSYYMHWVRQAPGQGLEWM |
| | H | NTGY | SGSL | (SEQ | NO: 65) | 114) | AWMNPNSGNTGYAQKFQGRVTMTR |
| | (SEQ | A | GYW | ID NO: | | | DTSTSTVYMELSSLRSEDTAVYYC |
| | ID | (SEQ | (SEQ | 218) | | | ARDYDFWSGSLGYWGQGTLVTVSS |
| | NO: | ID | ID | | | | GGGGSGGGGSGGGGSGGGGSDIQM |
| | 215) | NO: | NO: | | | | TQSPSSLSASVGDRVTITCRASQG |
| | | 216) | 217) | | | | ISNYLAWYQQKPGKAPKLLIYAAS |
| | | | | | | | SLQSGVPSRFSGSGSGTDFTLTIS |
| | | | | | | | SLQPEDFATYYCQQSYSTPWTFGQ |
| | | | | | | | GTKVEIK (SEQ ID NO: 219) |
| 30. | YTLT | GWIN | CAKG | RASDNI | AASSLQS | CQQGYSTPPTF | QVQLVQSGAEVKKPGASVKVSCKA |
| | TWYM | PNRG | DLWG | GSWLA | (SEQ ID | (SEQ ID NO: | SGYTLTTWYMYWVRQAPGQGLEWM |
| | Y | ATNY | AMDV | (SEQ | NO: 65) | 120) | GWINPNRGATNYAQKFQGRVTMTR |
| | (SEQ | A | W | ID NO: | | | DTSTSTVYMELSSLRSEDTAVYYC |
| | ID | (SEQ | (SEQ | 119) | | | AKGDLWGAMDVWGQGTLVTVSSGG |
| | NO: | ID | ID | | | | GGSGGGGSGGGGSGGGGSDIQMTQ |
| | 116) | NO: | NO: | | | | SPSSLSASVGDRVTITCRASDNIG |
| | | 117) | 118) | | | | SWLAWYQQKPGKAPKLLIYAASSL |
| | | | | | | | QSGVPSRFSGSGSGTDFTLTISSL |
| | | | | | | | QPEDFATYYCQQGYSTPPTFGQGT |
| | | | | | | | KVEIK (SEQ ID NO: 121) |
| 31. | YTFT | GUN | CARD | RASQSI | DASNLQS | CQQSYSIPITF | QVQLVQSGAEVKKPGASVKVSCKA |
| | SYYM | PSGG | TGYS | GRWLA | (SEQ ID | (SEQ ID NO: | SGYTFTSYYMHWVRQAPGQGLEWM |
| | H | STSY | YGRY | (SEQ | NO: | 198) | GIINPSGGSTSYAQKFQGRVTMTR |
| | (SEQ | A | YYYG | ID NO: | 222) | | DTSTSTVYMELSSLRSEDTAVYYC |
| | ID | (SEQ | MDVW | 221) | | | ARDTGYSYGRYYYYGMDVWGQGTL |
| | NO: | ID | (SEQ | | | | VTVSSGGGGSGGGGSGGGGSGGGG |
| | 215) | NO: | ID | | | | SDIQMTQSPSSLSASVGDRVTITC |
| | | 69) | NO: | | | | RASQSIGRWLAWYQQKPGKAPKLL |
| | | | 220) | | | | IYDASNLQSGVPSRFSGSGSGTDF |
| | | | | | | | TLTISSLQPEDFATYYCQQSYSIP |
| | | | | | | | ITFGQGTKVEIK (SEQ ID NO: |
| | | | | | | | 223) |
| 32. | YTLT | GUN | CARE | RASQGI | AASSLQS | CQQSYSTPLTF | QVQLVQSGAEVKKPGASVKVSCKA |
| | DYYM | PSGG | EYSS | SSWLA | (SEQ ID | (SEQ ID NO: | SGYTLTDYYMHWVRQAPGQGLEWM |
| | H | STSY | SSGY | (SEQ | NO: 65) | 173) | GIINPSGGSTSYAQKFQGRVTMTR |
| | (SEQ | A | FDYW | ID NO: | | | DTSTSTVYMELSSLRSEDTAVYYC |
| | ID | (SEQ | (SEQ | 226) | | | AREEYSSSSGYFDYWGQGTLVTVS |
| | NO: | ID | ID | | | | SGGGGSGGGGSGGGGSGGGGSDIQ |
| | 224) | NO: | NO: | | | | MTQSPSSLSASVGDRVTITCRASQ |
| | | 69) | 225) | | | | GISSWLAWYQQKPGKAPKLLIYAA |
| | | | | | | | SSLQSGVPSRFSGSGSGTDFTLTI |
| | | | | | | | SSLQPEDFATYYCQQSYSTPLTFG |
| | | | | | | | QGTKVEIK (SEQ ID NO: |
| | | | | | | | 227) |
| 33. | YTFT | GWMH | CARD | RASQSI | AASSLQS | CQQSYSVPITF | QVQLVQSGAEVKKPGASVKVSCKA |
| | SYGI | PKSG | TPYY | SSWLA | (SEQ ID | (SEQ ID NO: | SGYTFTSYGISWVRQAPGQGLEWM |
| | S | DTGL | YYGM | (SEQ | NO: 65) | 231) | GWMHPKSGDTGLTQKFQGRVTMTR |
| | (SEQ | T | DVW | ID NO: | | | DTSTSTVYMELSSLRSEDTAVYYC |
| | ID | (SEQ | (SEQ | 196) | | | ARDTPYYYYGMDVWGQGTTVTVSS |
| | NO: | ID | ID | | | | GGGGSGGGGSGGGGSGGGGSDIQM |
| | 228) | NO: | NO: | | | | TQSPSSLSASVGDRVTITCRASQS |
| | | 229) | 230) | | | | ISSWLAWYQQKPGKAPKLLIYAAS |
| | | | | | | | SLQSGVPSRFSGSGSGTDFTLTIS |
| | | | | | | | SLQPEDFATYYCQQSYSVPITFGQ |
| | | | | | | | GTKVEIK (SEQ ID NO: 232) |
| 34. | FTFG | SYIS | CARD | RASQSI | AASSLQS | CQQSYSTPLTF | EVQLVESGGGLVKPGGSLRLSCAA |
| | DYAM | GDIG | VAAT | SSYLN | (SEQ ID | (SEQ ID NO: | SGFTFGDYAMSWVRQAPGKGLEWV |
| | S | YTNY | GNWY | (SEQ | NO: 65) | 173) | SYISGDIGYTNYAAPVKGRFTISR |
| | (SEQ | A | FDLW | ID NO: | | | DDSKNTLYLQMNSLKTEDTAVYYC |
| | ID | (SEQ | (SEQ | 172) | | | ARDVAATGNWYFDLWGRGTLVTVS |
| | NO: | ID | ID | | | | SGGGGSGGGGSGGGGSGGGGSDIQ |
| | 233) | NO: | NO: | | | | MTQSPSSLSASVGDRVTITCRASQ |
| | | 234) | 235) | | | | SISSYLNWYQQKPGKAPKLLIYAA |
| | | | | | | | SSLQSGVPSRFSGSGSGTDFTLTI |
| | | | | | | | SSLQPEDFATYYCQQSYSTPLTFG |
| | | | | | | | GGTKVEIK (SEQ ID NO: |
| | | | | | | | 236) |
| 35. | FSFS | SFIT | CARD | RASQSV | GASTRAT | CQQYGSSPLTF | EVQLLESGGGLVQPGGSLRLSCAA |
| | SYTM | SSSR | RRGD | RNYLA | (SEQ ID | (SEQ ID NO: | SGFSFSSYTMNWVRQAPGKGLEWV |
| | N | TIYY | YGDS | (SEQ | NO: | 242) | SFITSSSRTIYYADSVKGRFTISR |
| | (SEQ | A | WYFD | ID NO: | 241) | | DNSKNTLYLQMNSLRAEDTAVYYC |
| | ID | (SEQ | LW | 240) | | | ARDRRGDYGDSWYFDLWGRGTLVT |
| | NO: | ID | (SEQ | | | | VSSGGGGSGGGGSGGGGSGGGGSE |
| | 237) | NO: | ID | | | | IVMTQSPATLSVSPGERATLSCRA |
| | | 238) | NO: | | | | SQSVRNYLAWYQQKPGQAPRLLIY |
| | | | 239) | | | | GASTRATGIPARFSGSGSGTEFTL |
| | | | | | | | TISSLQSEDFAVYYCQQYGSSPLT |
| | | | | | | | FGGGTKVEIK (SEQ ID NO: |
| | | | | | | | 243) |
| 36. | YTFT | GUN | CARD | RASQSI | DASNLQS | CQQSYSIPITF | QVQLVQSGAEVKKPGASVKVSCKA |
| | GHYM | PSGG | TGYS | GRWLA | (SEQ ID | (SEQ ID NO: | sgytftghymhwvrqapgqglewm |
| | H | STSY | YGRY | (SEQ | NO: | 198) | GIINPSGGSTSYAQKFQGRVTMTR |
| | (SEQ | A | YYYG | ID NO: | 222) | | DTSTSTVYMELSSLRSEDTAVYYC |
| | ID | (SEQ | MDVW | 221) | | | ARDTGYSYGRYYYYGMDVWGQGTT |
| | | ID | (SEQ | | | | VTVSSGGGGSGGGGSGGGGSGGGG |
| | NO: | NO: | ID | | | | SDIQMTQSPSSLSASVGDRVTITC |
| | 244) | 69) | NO: | | | | RASQSIGRWLAWYQQKPGKAPKLL |
| | | | 220) | | | | IYDASNLQSGVPSRFSGSGSGTDF |
| | | | | | | | TLTISSLQPEDFATYYCQQSYSIP |
| | | | | | | | ITFGGGTKVEIK (SEQ ID NO: |
| | | | | | | | 245) |
| 37. | YTFS | GWMN | CARG | RASQSI | AASTLQS | CQQSYSTPWTF | QVQLVQSGAEVKKPGASVKVSCKA |
| | KHFV | PNSG | EGGY | SSWLA | (SEQ ID | (SEQ ID NO: | SGYTFSKHFVHWVRQAPGQGLEWM |
| | H | NSGY | YYYG | (SEQ | NO: | 114) | GWMNPNSGNSGYAQKFQGRVTMTR |
| | (SEQ | A | MDVW | ID NO: | 113) | | DTSTSTVYMELSSLRSEDTAVYYC |
| | ID | (SEQ | (SEQ | 196) | | | ARGEGGYYYYGMDVWGQGTLVTVS |
| | NO: | ID | ID | | | | SGGGGSGGGGSGGGGSGGGGSDIQ |
| | 246) | NO: | NO: | | | | MTQSPSSLSASVGDRVTITCRASQ |
| | | 247) | 248) | | | | SISSWLAWYQQKPGKAPKLLIYAA |
| | | | | | | | STLQSGVPSRFSGSGSGTDFTLTI |
| | | | | | | | SSLQPEDFATYYCQQSYSTPWTFG |
| | | | | | | | QGTKVEIK (SEQ ID NO: |
| | | | | | | | 249) |
| 38. | FTFG | SAIG | CAKG | RASQPL | AASSLQS | CQQAISFPLTF | EVQLLESGGGLVQPGGSLRLSCAA |
| | SYSM | TGGG | TPYY | SNWLA | (SEQ ID | (SEQ ID NO: | SGFTFGSYSMSWVRQAPGKGLEWV |
| | S | TYYA | YYYG | (SEQ | NO: 65) | 254) | SAIGTGGGTYYADSVKGRFTISRD |
| | (SEQ | (SEQ | MDVW | ID NO: | | | NSKNTLYLQMNSLRAEDTAVYYCA |
| | ID | ID | (SEQ | 253) | | | KGTPYYYYYGMDVWGQGTMVTVSS |
| | NO: | NO: | ID | | | | GGGGSGGGGSGGGGSGGGGSDIQM |
| | 250) | 251) | NO: | | | | TQSPSSLSASVGDRVTITCRASQP |
| | | | 252) | | | | LSNWLAWYQQKPGKAPKLLIYAAS |
| | | | | | | | SLQSGVPSRFSGSGSGTDFTLTIS |
| | | | | | | | SLQPEDFATYYCQQAISFPLTFGG |
| | | | | | | | GTKVEIK (SEQ ID NO: 255) |
| 39. | YTFT | GWMN | CARD | QSSEDI | AASSLQI | CQQTYSTPYTF | QVQLVQSGAEVKKPGASVKVSCKA |
| | SYYM | PNSG | LGYY | SSSLN | (SEQ ID | (SEQ ID NO: | SGYTFTSYYMHWVRQAPGQGLEWM |
| | H | NTGY | DSSG | (SEQ | NO: | 259) | GWMNPNSGNTGYAQKFQGRVTMTR |
| | (SEQ | A | YFGA | ID NO: | 258) | | DTSTSTVYMELSSLRSEDTAVYYC |
| | ID | (SEQ | FDIW | 257) | | | ARDLGYYDSSGYFGAFDIWGQGTT |
| | NO: | ID | (SEQ | | | | VTVSSGGGGSGGGGSGGGGSGGGG |
| | 215) | NO: | ID | | | | SDIQMTQSPSSLSASVGDRVTITC |
| | | 205) | NO: | | | | QSSEDISSSLNWYQQKPGKAPKLL |
| | | | 256) | | | | IYAASSLQIGVPSRFSGSGSGTDF |
| | | | | | | | TLTISSLQPEDFATYYCQQTYSTP |
| | | | | | | | YTFGQGTKVEIK (SEQ ID NO: |
| | | | | | | | 260) |
| 40. | YTFT | GUN | CARG | RASQGI | AASNLET | CQQIHSYPLTF | QVQLVQSGAEVKKPGASVKVSCKA |
| | SYGI | PRGG | TRSS | GNWLA | (SEQ ID | (SEQ ID NO: | SGYTFTSYGISWVRQAPGQGLEWM |
| | S | STIF | GWYG | (SEQ | NO: | 265) | GIINPRGGSTIFAQKFQGRVTMTR |
| | (SEQ | A | WFDP | ID NO: | 264) | | DTSTSTVYMELSSLRSEDTAVYYC |
| | ID | (SEQ | W | 263) | | | ARGTRSSGWYGWFDPWGQGTLVTV |
| | NO: | ID | (SEQ | | | | SSGGGGSGGGGSGGGGSGGGGSDI |
| | 228) | NO: | ID | | | | QMTQSPSSLSASVGDRVTITCRAS |
| | | 261) | NO: | | | | QGIGNWLAWYQQKPGKAPKLLIYA |
| | | | 262) | | | | ASNLETGVPSRFSGSGSGTDFTLT |
| | | | | | | | ISSLQPEDFATYYCQQIHSYPLTF |
| | | | | | | | GGGTKVEIK (SEQ ID NO: |
| | | | | | | | 266) |
| 41. | FTFD | SYIS | CARE | RASQSI | AASSLQS | CQQSYSTPLTF | EVQLLESGGGLVQPGGSLRLSCAA |
| | DYGM | SSSS | IAAA | SSYLN | (SEQ ID | (SEQ ID NO: | SGFTFDDYGMSWVRQAPGKGLEWV |
| | S | YIYY | GFYG | (SEQ | NO: 65) | 173) | SYISSSSSYIYYADSVKGRFTISR |
| | (SEQ | A | MDVW | ID NO: | | | DNSKNTLYLQMNSLRAEDTAVYYC |
| | ID | (SEQ | (SEQ | 172) | | | AREIAAAGFYGMDVWGQGTTVTVS |
| | NO: | ID | ID | | | | SGGGGSGGGGSGGGGSGGGGSDIQ |
| | 267) | NO: | NO: | | | | MTQSPSSLSASVGDRVTITCRASQ |
| | | 268) | 269) | | | | SISSYLNWYQQKPGKAPKLLIYAA |
| | | | | | | | SSLQSGVPSRFSGSGSGTDFTLTI |
| | | | | | | | SSLQPEDFATYYCQQSYSTPLTFG |
| | | | | | | | GGTKVEIK (SEQ ID NO: |
| | | | | | | | 270) |
| 42. | GTLS | GGII | CARD | RASQSV | GASTRAT | CQQYGSSPITF | QVQLVQSGAEVKKPGSSVKVSCKA |
| | RYGV | PIFG | RVYY | SSSYLA | (SEQ ID | (SEQ ID NO: | SGGTLSRYGVSWVRQAPGQGLEWM |
| | S | TTNY | DSSG | (SEQ | NO: | 275) | GGIIPIFGTTNYAQKFQGRVTITA |
| | (SEQ | A | YPTW | ID NO: | 241) | | DESTSTAYMELSSLRSEDTAVYYC |
| | ID | (SEQ | YFDL | 274) | | | ARDRVYYDSSGYPTWYFDLWGRGT |
| | NO: | ID | W | | | | LVTVSSGGGGSGGGGSGGGGSGGG |
| | 271) | NO: | (SEQ | | | | GSEIVMTQSPATLSVSPGERATLS |
| | | 272) | ID | | | | CRASQSVSSSYLAWYQQKPGQAPR |
| | | | NO: | | | | LLIYGASTRATGIPARFSGSGSGT |
| | | | 273) | | | | EFTLTISSLQSEDFAVYYCQQYGS |
| | | | | | | | SPITFGQGTKVEIK (SEQ ID |
| | | | | | | | NO: 276) |
| 43. | FTFD | SGIS | CARD | QASQDI | KASTLES | CQQANSFPLTF | EVQLLESGGGLVQPGGSLRLSCAA |
| | DFAM | GNGD | ASYG | RNYLN | (SEQ ID | (SEQ ID NO: | SGFTFDDFAMHWVRQAPGKGLEWV |
| | H | SRYY | GNYG | (SEQ | NO: | 167) | SGISGNGDSRYYADSVKGRFTISR |
| | (SEQ | A | MDVW | ID NO: | 139) | | DNSKNTLYLQMNSLRAEDTAVYYC |
| | ID | (SEQ | (SEQ | 280) | | | ARDASYGGNYGMDVWGQGTTVTVS |
| | NO: | ID | ID | | | | SGGGGSGGGGSGGGGSGGGGSDIQ |
| | 277) | NO: | NO: | | | | MTQSPSSLSASVGDRVTITCQASQ |
| | | 278) | 279) | | | | DIRNYLNWYQQKPGKAPKLLIYKA |
| | | | | | | | STLESGVPSRFSGSGSGTDFTLTI |
| | | | | | | | SSLQPEDFATYYCQQANSFPLTFG |
| | | | | | | | PGTKVDIK (SEQ ID NO: |
| | | | | | | | 281) |
| 44. | FTFS | SAIG | CARE | RASQSI | GASNLQS | CQQSYSTPWTF | EVQLVESGGGLVKPGGSLRLSCAA |
| | SYWM | TGGG | WLVP | SRWLA | (SEQ ID | (SEQ ID NO: | SGFTFSSYWMSWVRQAPGKGLEWV |
| | S | TYYA | YYGM | (SEQ | NO: | 114) | SAIGTGGGTYYAAPVKGRFTISRD |
| | (SEQ | (SEQ | DVW | ID NO: | 284) | | DSKNTLYLQMNSLKTEDTAVYYCA |
| | ID | ID | (SEQ | 283) | | | REWLVPYYGMDVWGQGTTVTVSSG |
| | NO: | NO: | ID | | | | GGGSGGGGSGGGGSGGGGSDIQMT |
| | 169) | 251) | NO: | | | | QSPSSLSASVGDRVTITCRASQSI |
| | | | 282) | | | | SRWLAWYQQKPGKAPKLLIYGASN |
| | | | | | | | LQSGVPSRFSGSGSGTDFTLTISS |
| | | | | | | | LQPEDFATYYCQQSYSTPWTFGQG |
| | | | | | | | TKVEIK (SEQ ID NO: 285) |
| 45. | FSVS | AGIS | CARS | KSSQSV | WASTRQS | CHQYYGHPPTF | EVQLLESGGGLVQPGGSLRLSCAA |
| | SNYM | YDGS | RGIA | LYSSNN | (SEQ ID | (SEQ ID NO: | SGFSVSSNYMSWVRQAPGKGLEWV |
| | S | SKPY | ARPL | KNYLA | NO: | 291) | AGISYDGSSKPYADSVKGRFTISR |
| | (SEQ | A | QHW | (SEQ | 290) | | DNSKNTLYLQMNSLRAEDTAVYYC |
| | ID | (SEQ | (SEQ | ID NO: | | | ARSRGIAARPLQHWGQGTLVTVSS |
| | NO: | ID | ID | 289) | | | GGGGSGGGGSGGGGSGGGGSDIVM |
| | 286) | NO: | NO: | | | | TQSPDSLAVSLGERATINCKSSQS |
| | | 287) | 288) | | | | VLYSSNNKNYLAWYQQKPGQPPKL |
| | | | | | | | LIYWASTRQSGVPDRFSGSGSGTD |
| | | | | | | | FTLTISSLQAEDVAVYYCHQYYGH |
| | | | | | | | PPTFGGGTKVEIK (SEQ ID |
| | | | | | | | NO: 292) |
| 46. | FSVS | AGIS | CARS | KSSQSV | QASTRQS | CHQYYGHPPTF | EVQLLESGGGLVQPGGSLRLSCAA |
| | SNYM | YDGS | RGIA | LYSSNN | (SEQ ID | (SEQ ID NO: | SGFSVSSNYMSWVRQAPGKGLEWV |
| | S | SKPY | ARPL | KNYLA | NO: | 291) | AGISYDGSSKPYADSVKGRFTISR |
| | (SEQ | A | QHW | (SEQ | 293) | | DNSKNTLYLQMNSLRAEDTAVYYC |
| | ID | (SEQ | (SEQ | ID NO: | | | ARSRGIAARPLQHWGQGTLVTVSS |
| | NO: | ID | ID | 289) | | | GGGGSGGGGSGGGGSGGGGSDIVM |
| | 286) | NO: | NO: | | | | TQSPDSLAVSLGERATINCKSSQS |
| | | 287) | 288) | | | | VLYSSNNKNYLAWYQQKPGQPPKL |
| | | | | | | | LIYQASTRQSGVPDRFSGSGSGTD |
| | | | | | | | FTLTISSLQAEDVAVYYCHQYYGH |
| | | | | | | | PPTFGGGTKVEIK (SEQ ID |
| | | | | | | | NO: 294) |
| 47. | FSFS | SAIS | CARD | RASQGI | DASNLET | CQQSYSTPLTF | EVQLLESGGGLVQPGGSLRLSCAA |
| | DYGM | GSGG | GGWQ | SNNLN | (SEQ ID | (SEQ ID NO: | SGFSFSDYGMHWVRQAPGKGLEWV |
| | H | STYY | PAAI | (SEQ | NO: | 173) | SAISGSGGSTYYADSVKGRFTISR |
| | (SEQ | A | LDYW | ID NO: | 159) | | DNSKNTLYLQMNSLRAEDTAVYYC |
| | ID | (SEQ | (SEQ | 105) | | | ARDGGWQPAAILDYWGQGTLVTVS |
| | NO: | ID | ID | | | | SGGGGSGGGGSGGGGSGGGGSDIQ |
| | 295) | NO: | NO: | | | | MTQSPSSLSASVGDRVTITCRASQ |
| | | 103) | 296) | | | | GISNNLNWYQQKPGKAPKLLIYDA |
| | | | | | | | SNLETGVPSRFSGSGSGTDFTLTI |
| | | | | | | | SSLQPEDFATYYCQQSYSTPLTFG |
| | | | | | | | GGTKVEIK (SEQ ID NO: |
| | | | | | | | 297) |
| 48. | FTFS | SVIY | CARD | RASQGI | DASNLET | CQQSYSTCYTF | EVQLLESGGGLVQPGGSLRLSCAA |
| | DHGM | GGES | PAVA | SNYLA | (SEQ ID | (SEQ ID NO: | SGFTFSDHGMHWVRQAPGKGLEWV |
| | H | TYYA | GGGI | (SEQ | NO: | 301) | SVIYGGESTYYADSVKGRFTISRD |
| | (SEQ | (SEQ | FDYW | ID NO: | 159) | | NSKNTLYLQMNSLRAEDTAVYYCA |
| | ID | ID | (SEQ | 218) | | | RDPAVAGGGIFDYWGQGTLVTVSS |
| | NO: | NO: | ID | | | | GGGGSGGGGSGGGGSGGGGSDIQM |
| | 298) | 299) | NO: | | | | TQSPSSLSASVGDRVTITCRASQG |
| | | | 300) | | | | ISNYLAWYQQKPGKAPKLLIYDAS |
| | | | | | | | NLETGVPSRFSGSGSGTDFTLTIS |
| | | | | | | | SLQPEDFATYYCQQSYSTCYTFGQ |
| | | | | | | | GTKLEIK (SEQ ID NO: 302) |
| 49. | DTFT | GWIN | CARS | RASQTI | DASTLQS | CQQYSSYPLTF | QVQLVQSGAEVKKPGASVKVSCKA |
| | GYYI | PNSG | GLWL | SIWLA | (SEQ ID | (SEQ ID NO: | SGDTFTGYYIHWVRQAPGQGLEWM |
| | H | GTNY | GSYY | (SEQ | NO: | 308) | GWINPNSGGTNYAQKFQGRVTMTR |
| | (SEQ | A | GMDV | ID NO: | 307) | | DTSTSTVYMELSSLRSEDTAVYYC |
| | ID | (SEQ | W | 306) | | | ARSGLWLGSYYGMDVWGQGTLVTV |
| | NO: | ID | (SEQ | | | | SSGGGGSGGGGSGGGGSGGGGSDI |
| | 303) | NO: | ID | | | | QMTQSPSSLSASVGDRVTITCRAS |
| | | 304) | NO: | | | | QTISIWLAWYQQKPGKAPKLLIYD |
| | | | 305) | | | | ASTLQSGVPSRFSGSGSGTDFTLT |
| | | | | | | | ISSLQPEDFATYYCQQYSSYPLTF |
| | | | | | | | GQGTKVEIK (SEQ ID NO: |
| | | | | | | | 309) |
| 50. | YTFT | GWIN | CARS | RASHFI | AASTLQS | CQQSYSGISF | QVQLVQSGAEVKKPGASVKVSCKA |
| | SYDI | PNSG | PYYY | SRWVA | (SEQ ID | (SEQ ID NO: | SGYTFTSYDINWVRQAPGQGLEWM |
| | N | TTGY | YGMD | (SEQ | NO: | 314) | GWINPNSGTTGYAQKFQGRVTMTR |
| | (SEQ | A | VW | ID NO: | 113) | | DTSTSTVYMELSSLRSEDTAVYYC |
| | ID | (SEQ | (SEQ | 313) | | | ARSPYYYYGMDVWGQGTTVTVSSG |
| | NO: | ID | ID | | | | GGGSGGGGSGGGGSGGGGSDIQMT |
| | 310) | NO: | NO: | | | | QSPSSLSASVGDRVTITCRASHFI |
| | | 311) | 312) | | | | SRWVAWYQQKPGKAPKLLIYAAST |
| | | | | | | | LQSGVPSRFSGSGSGTDFTLTISS |
| | | | | | | | LQPEDFATYYCQQSYSGISFGPGT |
| | | | | | | | KVDIK (SEQ ID NO: 315) |
| 51. | FTFN | SRIN | CARG | RASQSV | ATSSRAS | CQQYYSGLTF | EVQLLESGGGLVQPGGSLRLSCAA |
| | NYGM | SDGS | AYYY | SGSYLA | (SEQ ID | (SEQ ID NO: | SGFTFNNYGMNWVRQAPGKGLEWV |
| | N | STSY | YYMD | (SEQ | NO: | 321) | SRINSDGSSTSYADSVKGRFTISR |
| | (SEQ | A | VW | ID NO: | 320) | | DNSKNTLYLQMNSLRAEDTAVYYC |
| | ID | (SEQ | (SEQ | 319) | | | ARGAYYYYYMDVWGQGTLVTVSSG |
| | NO: | ID | ID | | | | GGGSGGGGSGGGGSGGGGSEIVMT |
| | 316) | NO: | NO: | | | | QSPATLSVSPGERATLSCRASQSV |
| | | 317) | 318) | | | | SGSYLAWYQQKPGQAPRLLIYATS |
| | | | | | | | SRASGIPARFSGSGSGTEFTLTIS |
| | | | | | | | SLQSEDFAVYYCQQYYSGLTFGQG |
| | | | | | | | TKVEIK (SEQ ID NO: 322) |
| 52. | FTFS | AHIW | CARD | RASQDI | DASSLET | CQQATSLPLTF | EVQLLESGGGLVQPGGSLRLSCAA |
| | NSDM | NDGS | RTDP | RNYLG | (SEQ ID | (SEQ ID NO: | SGFTFSNSDMNWVRQAPGKGLEWV |
| | N | QKYY | GYSS | (SEQ | NO: | 328) | AHIWNDGSQKYYADSVKGRFTISR |
| | (SEQ | A | AMDV | ID NO: | 327) | | DNSKNTLYLQMNSLRAEDTAVYYC |
| | ID | (SEQ | W | 326) | | | ARDRTDPGYSSAMDVWGQGTTVTV |
| | NO: | ID | (SEQ | | | | SSGGGGSGGGGSGGGGSGGGGSDI |
| | 323) | NO: | ID | | | | QMTQSPSSLSASVGDRVTITCRAS |
| | | 324) | NO: | | | | QDIRNYLGWYQQKPGKAPKLLIYD |
| | | | 325) | | | | ASSLETGVPSRFSGSGSGTDFTLT |
| | | | | | | | ISSLQPEDFATYYCQQATSLPLTF |
| | | | | | | | GGGTKVEIK (SEQ ID NO: |
| | | | | | | | 329) |
| 53. | YTFT | GWMN | CAKD | RASQDI | QASSLES | CQQSYTIPLTF | QVQLVQSGAEVKKPGASVKVSCKA |
| | SYDI | PNSG | SDYS | TNDLG | (SEQ ID | (SEQ ID NO: | SGYTFTSYDINWVRQAPGQGLEWM |
| | N | NTGY | NLLW | (SEQ | NO: | 333) | GWMNPNSGNTGYAQKFQGRVTMTR |
| | (SEQ | A | DYW | ID NO: | 332) | | DTSTSTVYMELSSLRSEDTAVYYC |
| | ID | (SEQ | (SEQ | 331) | | | AKDSDYSNLLWDYWGQGTLVTVSS |
| | NO: | ID | ID | | | | GGGGSGGGGSGGGGSGGGGSDIQM |
| | 310) | NO: | NO: | | | | TQSPSSLSASVGDRVTITCRASQD |
| | | 205) | 330) | | | | ITNDLGWYQQKPGKAPKLLIYQAS |
| | | | | | | | SLESGVPSRFSGSGSGTDFTLTIS |
| | | | | | | | SLQPEDFATYYCQQSYTIPLTFGQ |
| | | | | | | | GTKVEIK (SEQ ID NO: 334) |
| 54. | FTFG | AWS | CAKD | RASQNI | DASNLET | CQQANSFPPTF | EVQLLESGGGLVQPGGSLRLSCAA |
| | DYAM | YDGT | ICSS | NNYVN | (SEQ ID | (SEQ ID NO: | SGFTFGDYAMSWVRQAPGKGLEWV |
| | S | NKYY | TSCY | (SEQ | NO: | 338) | AVVSYDGTNKYYADSVKGRFTISR |
| | (SEQ | A | FDLW | ID NO: | 159) | | DNSKNTLYLQMNSLRAEDTAVYYC |
| | ID | (SEQ | (SEQ | 337) | | | AKDICSSTSCYFDLWGRGTLVTVS |
| | NO: | ID | ID | | | | SGGGGSGGGGSGGGGSGGGGSDIQ |
| | 233) | NO: | NO: | | | | MTQSPSSLSASVGDRVTITCRASQ |
| | | 335) | 336) | | | | NINNYVNWYQQKPGKAPKLLIYDA |
| | | | | | | | SNLETGVPSRFSGSGSGTDFTLTI |
| | | | | | | | SSLQPEDFATYYCQQANSFPPTFG |
| | | | | | | | QGTRLEIK (SEQ ID NO: |
| | | | | | | | 339) |
| 55. | YTFT | GIID | CARE | RASQGI | ATSSLQT | CQQTYSIPITF | QVQLVQSGAEVKKPGASVKVSCKA |
| | SYYM | PSGG | EWSS | SSYLA | (SEQ ID | (SEQ ID NO: | SGYTFTSYYMHWVRQAPGQGLEWM |
| | H | STSY | GGVG | (SEQ | NO: | 344) | GIIDPSGGSTSYAQKFQGRVTMTR |
| | (SEQ | A | YFDY | ID NO: | 343) | | DTSTSTVYMELSSLRSEDTAVYYC |
| | ID | (SEQ | W | 342) | | | AREEWSSGGVGYFDYWGQGTLVTV |
| | NO: | ID | (SEQ | | | | SSGGGGSGGGGSGGGGSGGGGSDI |
| | 215) | NO: | ID | | | | QMTQSPSSLSASVGDRVTITCRAS |
| | | 340) | | | | | QGISSYLAWYQQKPGKAPKLLIYA |
| | | | NO: | | | | TSSLQTGVPSRFSGSGSGTDFTLT |
| | | | 341) | | | | ISSLQPEDFATYYCQQTYSIPITF |
| | | | | | | | GQGTRLEIK (SEQ ID NO: |
| | | | | | | | 345) |
| 56. | FTFD | SAIS | CARD | QASQDI | KASSLES | CQQANSYPVTF | EVQLLESGGGLVQPGGSLRLSCAA |
| | DYAM | GGGE | ASYG | RNYLN | (SEQ ID | (SEQ ID NO: | SGFTFDDYAMHWVRQAPGKGLEWV |
| | H | DTYY | GNYG | (SEQ | NO: | 348) | SAISGGGEDTYYADSVKGRFTISR |
| | (SEQ | A | MDVW | ID NO: | 347) | | DNSKNTLYLQMNSLRAEDTAVYYC |
| | ID | (SEQ | (SEQ | 280) | | | ARDASYGGNYGMDVWGQGTTVTVS |
| | NO: | ID | ID | | | | SGGGGSGGGGSGGGGSGGGGSDIQ |
| | 135) | NO: | NO: | | | | MTQSPSSLSASVGDRVTITCQASQ |
| | | 346) | 279) | | | | DIRNYLNWYQQKPGKAPKLLIYKA |
| | | | | | | | SSLESGVPSRFSGSGSGTDFTLTI |
| | | | | | | | SSLQPEDFATYYCQQANSYPVTFG |
| | | | | | | | GGTKVEIK (SEQ ID NO: |
| | | | | | | | 349) |
| 57. | YTFT | GUN | CARD | RASQGI | AASSLQG | CQQSYSLPYTF | QVQLVQSGAEVKKPGASVKVSCKA |
| | SYYM | PSGG | SVAG | SNYFA | (SEQ ID | (SEQ ID NO: | SGYTFTSYYMHWVRQAPGQGLEWM |
| | H | STSY | TGGR | (SEQ | NO: | 353) | GIINPSGGSTSYAQKFQGRVTMTR |
| | (SEQ | A | YYGM | ID NO: | 352) | | DTSTSTVYMELSSLRSEDTAVYYC |
| | ID | (SEQ | DVW | 351) | | | ARDSVAGTGGRYYGMDVWGQGTLV |
| | NO: | ID | (SEQ | | | | TVSSGGGGSGGGGSGGGGSGGGGS |
| | 215) | NO: | ID | | | | DIQMTQSPSSLSASVGDRVTITCR |
| | | 69) | NO: | | | | ASQGISNYFAWYQQKPGKAPKLLI |
| | | | 350) | | | | YAASSLQGGVPSRFSGSGSGTDFT |
| | | | | | | | LTISSLQPEDFATYYCQQSYSLPY |
| | | | | | | | TFGQGTKLEIK (SEQ ID NO: |
| | | | | | | | 354) |
| 58. | YTFT | GUN | CTTA | RASQGI | AASSLQS | CQQYYSNADF | QVQLVQSGAEVKKPGASVKVSCKA |
| | GYYM | PSGG | DYYY | SNYLA | (SEQ ID | (SEQ ID NO: | SGYTFTGYYMHWVRQAPGQGLEWM |
| | H | NTKY | YMDV | (SEQ | NO: 65) | 357) | GIINPSGGNTKYAQKFQGRVTMTR |
| | (SEQ | A | W | ID NO: | | | DTSTSTVYMELSSLRSEDTAVYYC |
| | ID | (SEQ | (SEQ | 218) | | | TTADYYYYMDVWGKGTTVTVSSGG |
| | NO: | ID | ID | | | | GGSGGGGSGGGGSGGGGSDIQMTQ |
| | 128) | NO: | NO: | | | | SPSSLSASVGDRVTITCRASQGIS |
| | | 355) | 356) | | | | NYLAWYQQKPGKAPKLLIYAASSL |
| | | | | | | | QSGVPSRFSGSGSGTDFTLTISSL |
| | | | | | | | QPEDFATYYCQQYYSNADFGQGTK |
| | | | | | | | VEIK (SEQ ID NO: 358) |
| 59. | FTFS | SYIS | CARD | RASQSV | SSLQS | QQYKSYPVT | EVQLLESGGGLVQPGGSLRLSCAA |
| | DFWM | GDSG | RPYY | SRSLA | (SEQ ID | (SEQ ID NO: | SGFTFSDFWMHWVRQAPGKGLEWI |
| | H | YTNY | YYMD | (SEQ | NO: | 363) | SYISGDSGYTNYADSVKGRFTISR |
| | (SEQ | A | VW | ID NO: | 362) | | DNSKNTLYLQMNSLRAEDTAVYYC |
| | ID | (SEQ | (SEQ | 361) | | | ARDRPYYYYMDVWGKGTTVTVSSG |
| | NO: | ID | ID | | | | GGGSGGGGSGGGGSGGGGSDIQMT |
| | 359) | NO: | NO: | | | | QSPSSLSASVGDRVTITCRASQSV |
| | | 170) | 360) | | | | SRSLAWYQQKPGKAPKLLIYAASS |
| | | | | | | | LQSGVPSRFSGSGSGTDFTLTISS |
| | | | | | | | LQPEDFATYYCQQYKSYPVTFGQG |
| | | | | | | | TKVEIK (SEQ ID NO: 364) |
| 60. | FTFD | SDIS | CAKD | QASQDI | SYLQS | QQAHNYPIT | EVQLLESGGGLVQPGGSLRLSCAA |
| | DYTM | GSGG | VWA | SNYLN | (SEQ ID | (SEQ ID NO: | SGFTFDDYTMHWVRQAPGKGLEWV |
| | H | STYY | GTPL | (SEQ | NO: | 369) | SDISGSGGSTYYADSVKGRFTISR |
| | (SEQ | A | HFDY | ID NO: | 368) | | DNSKNTLYLQMNSLRAEDTAVYYC |
| | ID | (SEQ | W | 138) | | | AKDVVVAGTPLHFDYWGQGTLVTV |
| | | ID | (SEQ | | | | SSGGGGSGGGGSGGGGSGGGGSDI |
| | NO: | NO: | ID | | | | QMTQSPSSLSASVGDRVTITCQAS |
| | 365) | 366) | NO: | | | | QDISNYLNWYQQKPGKAPKLLIYA |
| | | | 367) | | | | ASYLQSGVPSRFSGSGSGTDFTLT |
| | | | | | | | ISSLQPEDFATYYCQQAHNYPITF |
| | | | | | | | GQGTRLEIK (SEQ ID NO: |
| | | | | | | | 370) |
| 61. | FTFS | ASIS | CARE | RASQSI | SSLQS | QQANAFPPT | EVQLLESGGGLVQPGGSLRLSCAA |
| | NAWM | STSA | WGA | STWLA | (SEQ ID | (SEQ ID NO: | SEFTFSNAWMSWVRQAPGKGLEWV |
| | S | YIDY | TTFD | (SEQ | NO: | 374) | ASISSTSAYIDYADSVKGRFTISR |
| | (SEQ | A | YW | ID NO: | 362) | | DNSKNTLYLQMNSLRAEDTAVYYC |
| | ID | (SEQ | (SEQ | 373) | | | AREVVGATTFDYWGQGTLVTVSSG |
| | NO: | ID | ID | | | | GGGSGGGGSGGGGSGGGGSDIQMT |
| | 183) | NO: | NO: | | | | QSPSSLSASVGDRVTITCRASQSI |
| | | 371) | 372) | | | | STWLAWYQQKPGKAPKLLIYAASS |
| | | | | | | | LQSGVPSRFSGSGSGTDFTLTISS |
| | | | | | | | LQPEDFATYYCQQANAFPPTFGQG |
| | | | | | | | TRLEIK (SEQ ID NO: 375) |
| 62. | GTFS | GWME | CAKG | KSSQSV | STRES | QQYYSTPPT | QVQLVQSGAEVKKPGSSVKVSCKA |
| | SYAI | PHTG | GFSW | LYSSNN | (SEQ ID | (SEQ ID NO: | SGGTFSSYAISWVRQAPGQGLEWM |
| | S | NTRY | FDPW | KNYLA | NO: | 379) | GWMEPHTGNTRYAQKFQGRVTITA |
| | (SEQ | A | (SEQ | (SEQ | 378) | | DESTSTAYMELSSLRSEDTAVYYC |
| | ID | (SEQ | ID | ID NO: | | | AKGGFSWFDPWGQGTLVTVSSGGG |
| | NO: | ID | NO: | 289) | | | GSGGGGSGGGGSGGGGSDIVMTQS |
| | 77) | NO: | 377) | | | | PDSLAVSLGERATINCKSSQSVLY |
| | | 376) | | | | | SSNNKNYLAWYQQKPGQPPKLLIY |
| | | | | | | | WASTRESGVPDRFSGSGSGTDFTL |
| | | | | | | | TISSLQAEDVAVYYCQQYYSTPPT |
| | | | | | | | FGQGTRLEIK (SEQ ID NO: |
| | | | | | | | 380) |
| 63. | FTFD | ASIT | CARE | RASQGI | STRAT | QQYYTYPPT | EVQLLESGGGLVKPGGSLRLSCAA |
| | DYAM | SSSA | RVDW | SNSYLA | (SEQ ID | (SEQ ID NO: | SGFTFDDYAMHWVRQAPGKGLEWV |
| | H | FIDY | NSYF | (SEQ | NO: | 385) | ASITSSSAFIDYAASVKGRFTISR |
| | (SEQ | A | DLW | ID NO: | 384) | | DDSKNTLYLQMNSLKTEDTAVYYC |
| | ID | (SEQ | (SEQ | 383) | | | ARERVDWNSYFDLWGRGTLVTVSS |
| | NO: | ID | ID | | | | GGGGSGGGGSGGGGSGGGGSEIVM |
| | 135) | NO: | NO: | | | | TQSPATLSVSPGERATLSCRASQG |
| | | 381) | 382) | | | | ISNSYLAWYQQKPGQAPRLLIYGA |
| | | | | | | | STRATGIPARFSGSGSGTEFTLTI |
| | | | | | | | SSLQSEDFAVYYCQQYYTYPPTFG |
| | | | | | | | PGTKVDIK (SEQ ID NO: |
| | | | | | | | 386) |
| 64. | FAFS | AGTS | CARE | RASQGI | ANLEG | QQSDIFPPT | EVQLLESGGGLVKPGGSLRLSCAA |
| | SHWM | GSGE | TYYY | SNYLA | (SEQ ID | (SEQ ID NO: | SGFAFSSHWMHWVRQAPGKGLEWV |
| | H | SRDY | YYMD | (SEQ | NO: | 391) | AGTSGSGESRDYADFVKGRFTISR |
| | (SEQ | A | VW | ID NO: | 390) | | DDSKNTLYLQMNSLKTEDTAVYYC |
| | ID | (SEQ | (SEQ | 218) | | | ARETYYYYYMDVWGKGTTVTVSSG |
| | NO: | ID | ID | | | | GGGSGGGGSGGGGSGGGGSDIQMT |
| | 387) | NO: | NO: | | | | QSPSSLSASVGDRVTITCRASQGI |
| | | 388) | 389) | | | | SNYLAWYQQKPGKAPKLLIYDAAN |
| | | | | | | | LEGGVPSRFSGSGSGTDFTLTISS |
| | | | | | | | LQPEDFATYYCQQSDIFPPTFGQG |
| | | | | | | | TKVEIK (SEQ ID NO: 392) |
| 65. | YTFT | GWIN | CARE | RASQSI | SSLQS | QQSNSFPLT | QVQLVQSGAEVKKPGASVKVSCKA |
| | RHWI | VKTG | SSGW | SNYLA | (SEQ ID | (SEQ ID NO: | sgytftrhwihwvrqapgqglewm |
| | H | GAGY | YGTD | (SEQ | NO: | 397) | GWINVKTGGAGYAQKFQGRVTMTR |
| | (SEQ | A | VW | | 362) | | DTSTSTVYMELSSLRSEDTAVYYC |
| | ID | (SEQ | (SEQ | ID NO: | | | ARESSGWYGTDVWGQGTTVTVSSG |
| | NO: | ID | ID | 396) | | | GGGSGGGGSGGGGSGGGGSDIQMT |
| | 393) | NO: | NO: | | | | QSPSSLSASVGDRATITCRASQSI |
| | | 394) | 395) | | | | SNYLAWYQQKPGKAPKLLIYAASS |
| | | | | | | | LQSGVPSRFSGSGSGTDFTLTISS |
| | | | | | | | LQPEDFATYYCQQSNSFPLTFGGG |
| | | | | | | | TKVEIK (SEQ ID NO: 398) |
| 66. | FTFS | AAIS | CARE | QASQDI | NLRS | QQANSFPVT | EVQLLESGGGLVQPGGSLRLSCAA |
| | SYWM | YDGK | NKQW | SNFVN | (SEQ ID | (SEQ ID NO: | SGFTFSSYWMHWVRQAPGKGLEWV |
| | H | YKDY | LASF | (SEQ | NO: | 403) | AAISYDGKYKDYEDSVKGRFTISR |
| | (SEQ | E | DYW | ID NO: | 402) | | DNSKNTLYLQMNSLRAEDTAVYYC |
| | ID | (SEQ | (SEQ | 401) | | | ARENKQWLASFDYWGQGTLVTVSS |
| | NO: | ID | ID | | | | GGGGSGGGGSGGGGSGGGGSDIQM |
| | 83) | NO: | NO: | | | | TQSPSSLSASVGDRVTITCQASQD |
| | | 399) | 400) | | | | ISNFVNWYQQKPGKAPKLLIYAAN |
| | | | | | | | LRSGVPSRFSGSGSGTDFTLTISS |
| | | | | | | | LQPEDFATYYCQQANSFPVTFGPG |
| | | | | | | | TKVDIK (SEQ ID NO: 404) |

In some embodiments, the antibody comprises a CDR set as set forth in MAdCAM Antibody Table 1 or MAdCAM Antibody Table 2. In some embodiments, the antibody comprises the CDRs of Clone ID: 6, Clone ID: 59, or Clone ID: 63 of MAdCAM Antibody Table 1. The antibodies, can be in a scFv format, which are also illustrated in a non-limiting embodiment in MAdCAM Antibody Table 1.

[0417] In some embodiments, the MAdCAM antibody is selected from the following table, which can be in a IgG format as illustrated in MAdCAM Antibody Table 2.

TABLE 2
MAdCAM Antibody

| Clone | | | | | | | | |
|---|---|---|---|---|---|---|---|---|
| ID | HCDR1 | HCDR2 | HCDR3 | LCDR1 | LCDR2 | LCDR3 | VH | VK |
| 1. | FTFSSY | AVISDD | CTTSKYYYY | QASQDI | AASSL | CQQGYS | EVQLLESGGGLVQPGG | DIQMTQSPSSLSASV |
| | GMH | GSDKYY | YGMDVW | SKSLN | QS (SE | TPLTF | SLRLSCAASGFTFSSY | GDRVTITCQASQDIS |
| | (SEQ | A (SEQ | (SEQ ID | (SEQ | Q ID | (SEQ | GMHWVRQAPGKGLEWV | KSLNWYQQKPGKAPK |
| | ID NO: | ID NO: | NO: 63) | ID NO: | NO: | ID NO: | AVISDDGSDKYYADSV | LLIYAASSLQSGVPS |
| | 61) | 62) | | 64) | 65) | 66) | KGRFTISRDNSKNTLY | RFSGSGSGTDFTLTI |
| | | | | | | | LQMNSLRAEDTAVYYC | SSLQPEDFATYYCQQ |
| | | | | | | | TTSKYYYYYGMDVWGQ | GYSTPLTFGGGTKVE |
| | | | | | | | GTTVTVSS (SEQ ID | IK (SEQ ID NO: |
| | | | | | | | NO: 405) | 406) |
| 2. | YPFIGY | GIINPS | CAREGRLSY | RASQSI | GASTL | CQQTWG | QVQLVQSGAEVKKPGA | DIQMTQSPSSLSASV |
| | YLH | GGSTSY | GMDAW | SSYLA | ES | PPFTF | SVKVSCKASGYPFIGY | GDRVTITCRASQSIS |
| | (SEQ | A (SEQ | (SEQ ID | (SEQ | (SEQ | (SEQ | YLHWVRQAPGQGLEWM | SYLAWYQQKPGKAPK |
| | ID NO: | ID NO: | NO: 70) | ID NO: | ID | ID NO: | GIINPSGGSTSYAQKF | LLIYGASTLESGVPS |
| | 68) | 69) | | 71) | NO: | 73) | QGRVTMTRDTSTSTVY | RFSGSGSGTDFTLTI |
| | | | | | 72) | | MELSSLRSEDTAVYYC | SSLQPEDFATYYCQQ |
| | | | | | | | AREGRLSYGMDAWGQG | TWGPPFTFGQGTKLE |
| | | | | | | | TLVTVSS (SEQ ID | IK (SEQ ID NO: |
| | | | | | | | NO: 407) | 408) |
| 3. | YPFIGQ | GIINPS | CAREGRLSY | RASQSI | GASTL | CQQTWG | QVQLVQSGAEVKKPGA | DIQMTQSPSSLSASV |
| | YLH | GGSTSY | GMDAW | SSYLA | ES | PPFTF | SVKVSCKASGYPFIGQ | GDRVTITCRASQSIS |
| | (SEQ | A (SEQ | | (SEQ | (SEQ | (SEQ | YLHWVRQAPGQGLEWM | SYLAWYQQKPGKAPK |
| | ID NO: | ID NO: | (SEQ ID | ID NO: | ID | ID NO: | GIINPSGGSTSYAQKF | LLIYGASTLESGVPS |
| | 75 | 69) | NO: 70) | 71) | NO: | 73) | QGRVTMTRDTSTSTVY | RFSGSGSGTDFTLTI |
| | | | | | 72) | | MELSSLRSEDTAVYYC | SSLQPEDFATYYCQQ |
| | | | | | | | AREGRLSYGMDAWGQG | TWGPPFTFGQGTKLE |
| | | | | | | | TLVTVSS (SEQ ID | IK (SEQ ID NO: |
| | | | | | | | NO: 409) | 408) |
| 4. | GTFSSY | GSINPS | CAKDKAQWL | QASQDI | AASSL | CQQSYS | QVQLVQSGAEVKKPGA | DIQMTQSPSSLSASV |
| | AIS | GDTTSY | VGYFDYW | SNSLN | QS | SVITF | SVKVSCKASGGTFSSY | GDRVTITCQASQDIS |
| | (SEQ | A (SEQ | (SEQ ID | (SEQ | (SEQ | (SEQ | AISWVRQAPGQGLEWM | NSLNWYQQKPGKAPK |
| | ID NO: | ID NO: | NO: 79) | ID NO: | ID | ID NO: | GSINPSGDTTSYAQKF | LLIYAASSLQSGVPS |
| | 77) | 78) | | 80) | NO: | 81) | QGRVTMTRDTSTSTVY | RFSGSGSGTDFTLTI |
| | | | | | 65) | | MELSSLRSEDTAVYYC | SSLQPEDFATYYCQQ |
| | | | | | | | AKDKAQWLVGYFDYWG | SYSSVITFGQGTKVE |
| | | | | | | | QGTLVTVSS (SEQ | IK (SEQ ID NO: |
| | | | | | | | ID NO: 410) | 411) |
| 5. | FTFSSY | SSISPG | CAREVQLSH | RASQGI | GASSL | CQQANS | EVQLLESGGGLVQPGG | DIQMTQSPSSLSASV |
| | WMH | GSNIDY | YDYW (SEQ | SNSLA | QS | FPFTF | SLRLSCAASGFTFSSY | GDRVTITCRASQGIS |
| | (SEQ | A (SEQ | ID NO: | (SEQ | (SEQ | (SEQ | WMHWVRQAPGKGLEWV | NSLAWYQQKPGKAPK |
| | ID NO: | ID NO: | 85) | ID NO: | ID | ID NO: | SSISPGGSNIDYADSV | LLIYGASSLQSGVPS |
| | 83) | 84) | | 86) | NO: | 88) | KGRFTISRDNSKNTLY | RFSGSGSGTDFTLTI |
| | | | | | 87) | | LQMNSLRAEDTAVYYC | SSLQPEDFATYYCQQ |
| | | | | | | | AREVQLSHYDYWGQGT | ANSFPFTFGQGTKVE |
| | | | | | | | LVTVSS (SEQ ID | IK (SEQ ID NO: |
| | | | | | | | NO: 412) | 413) |
| 6. | FTFNNY | SRINSY | CAREGPVAG | RASQII | GASSL | CQQSYR | EVQLLESGGGLVQPGG | DIQMTQSPSSLSASV |
| | AFH | GTSTTY | YWYFDLW | GTNLA | QS | LPFTF | SLRLSCAASGFTFNNY | GDRVTITCRASQIIG |
| | (SEQ | A (SEQ | (SEQ ID | (SEQ | (SEQ | (SEQ | AFHWVRQAPGKGLEWV | TNLAWYQQKPGKAPK |
| | ID NO: | ID NO: | NO: 92) | ID NO: | ID | ID NO: | SRINSYGTSTTYADSV | LLIYGASSLQSGVPS |
| | 90) | 91) | | 93) | NO: | 94) | KGRFTISRDNSKNTLY | RFSGSGSGTDFTLTI |
| | | | | | 87) | | LQMNSLRAEDTAVYYC | SSLQPEDFATYYCQQ |
| | | | | | | | AREGPVAGYWYFDLWG | SYRLPFTFGQGTKVE |
| | | | | | | | QGTLVTVSS (SEQ | IK (SEQ ID NO: |
| | | | | | | | ID NO: 414) | 415) |
| 7. | FTFSDY | AIISHA | CAKPYSSGW | RASRGI | STLQS | QQAYSF | EVQLLESGGGLVQPGG | DIQMTQSPSSLSASV |
| | QMS | DGGFKD | SAVYYFDYW | TNDLG | (SEQ | PWT | SLRLSCAASGFTFSDY | GDRVTITCRASRGIT |
| | (SEQ | YA | (SEQ ID | (SEQ | ID | (SEQ | QMSWVRQAPGKGLEWV | NDLGWYQQKPGKAPK |
| | ID NO: | (SEQ | NO: 418) | ID NO: | NO: | ID NO: | AIISHADGGFKDYADS | LLIYAASTLQSGVPS |
| | 416) | ID NO: | | 419) | 420) | 421) | VKGRFTISRDNSKNTL | RFSGSGSGTDFTLTI |
| | | 417) | | | | | YLQMNSLRAEDTAVYY | SSLQPEDFATYYCQQ |
| | | | | | | | CAKPYSSGWSAVYYFD | AYSFPWTFGQGTKVE |
| | | | | | | | YWGQGTLVTVSS | IK (SEQ ID NO: |
| | | | | | | | (SEQ ID NO: 422) | 423) |
| 8. | YTFTGY | GIINPS | CAKDWSSWY | RASQNI | AASSL | CQQSYT | QVQLVQSGAEVKKPGA | DIQMTQSPSSLSASV |
| | HIH | GGSTIY | LGPFDYW | SSSLN | QS | TPYTF | SVKVSCKASGYTFTGY | GDRVTITCRASQNIS |
| | (SEQ | A (SEQ | (SEQ ID | (SEQ | (SEQ | (SEQ | HIHWVRQAPGQGLEWM | SSLNWYQQKPGKAPK |
| | ID NO: | ID NO: | NO: 98) | ID NO: | ID | ID NO: | GIINPSGGSTIYAQKF | LLIYAASSLQSGVPS |
| | 96) | 97) | | 99) | NO: | 100) | QGRVTMTRDTSTSTVY | RFSGSGSGTDFTLTI |
| | | | | | 65) | | MELSSLRSEDTAVYYC | SSLQPEDFATYYCQQ |
| | | | | | | | AKDWSSWYLGPFDYWG | SYTTPYTFGQGTKVE |
| | | | | | | | QGTLVTVSS (SEQ | IK (SEQ ID NO: |
| | | | | | | | ID NO: 424) | 425) |
| 9. | YTFTSY | GIINHS | CARPYSGWY | RASQSI | STLQS | QQSYST | QVQLVQSGAEVKKPGA | DIQMTQSPSSLSASV |
| | YMH | GGSTSY | FAFDIW | SSSLN | (SEQ | PLT | SVKVSCKASGYTFTSY | GDRVTITCRASQSIS |
| | (SEQ | A (SEQ | (SEQ ID | (SEQ | ID | (SEQ | YMHWVRQAPGQGLEWM | SSLNWYQQKPGKAPK |
| | ID NO: | ID NO: | NO: 427) | ID NO: | NO: | ID NO: | GIINHSGGSTSYAQKF | LLIYAASTLQSGVPS |
| | 215) | 426) | | 428) | 420) | 429) | QGRVTMTRDTSTSTVY | RFSGSGSGTDFTLTI |
| | | | | | | | MELSSLRSEDTAVYYC | SSLQPEDFATYYCQQ |
| | | | | | | | ARPYSGWYFAFDIWGQ | SYSTPLTFGQGTKVE |
| | | | | | | | GTLVTVSS (SEQ ID | IK (SEQ ID NO: |
| | | | | | | | NO: 430) | 431) |
| 10. | FMFGDY | SAISGS | CAKDLWAG | RASQGI | DASSL | CQQTHS | EVQLLESGGGLVQPGG | DIQMTQSPSSLSASV |
| | AMH | GGSTYY | IWYFDLW | SNNLN | ES | FPSTF | SLRLSCAASGFMFGDY | GDRVTITCRASQGIS |
| | (SEQ | A (SEQ | (SEQ ID | (SEQ | (SEQ | (SEQ | AMHWVRQAPGKGLEWV | NNLNWYQQKPGKAPK |
| | ID NO: | ID NO: | NO: 104) | ID NO: | ID | ID NO: | SAISGSGGSTYYADSV | LLIYDASSLESGVPS |
| | 102) | 103) | | 105) | NO: | 107) | KGRFTISRDNSKNTLY | RFSGSGSGTDFTLTI |
| | | | | | 106) | | LQMNSLRAEDTAVYYC | SSLQPEDFATYYCQQ |
| | | | | | | | AKDLWAGIWYFDLWG | THSFPSTFGQGTKLE |
| | | | | | | | RGTLVTVSS (SEQ | IK (SEQ ID NO: |
| | | | | | | | ID NO: 432) | 433) |
| 11. | FTFSDY | SVIGES | CAADPVSRW | RASQGI | AASTL | CQQSYS | EVQLLESGGGLVQPGG | DIQMTQSPSSLSASV |
| | YMN | GGSTYY | PKHGGGDYW | SSSLA | QS | TPWTF | SLRLSCAASGFTFSDY | GDRVTITCRASQGIS |
| | (SEQ | A (SEQ | (SEQ ID | (SEQ | (SEQ | (SEQ | YMNWVRQAPGKGLEWV | SSLAWYQQKPGKAPK |
| | ID NO: | ID NO: | NO: 111) | ID NO: | ID | ID NO: | SVIGESGGSTYYADSV | LLIYAASTLQSGVPS |
| | 109) | 110) | | 112) | NO: | 114) | KGRFTISRDNSKNTLY | RFSGSGSGTDFTLTI |
| | | | | | 113) | | LQMNSLRAEDTAVYYC | SSLQPEDFATYYCQQ |
| | | | | | | | AADPVSRWPKHGGGDY | SYSTPWTFGQGTKVE |
| | | | | | | | WGQGTLVTVSS (SEQ | IK (SEQ ID NO: |
| | | | | | | | ID NO: 434) | 435) |
| 12. | YTLTTW | GWINPN | CAKGDLWGA | RASDNI | AASSL | CQQGYS | QVQLVQSGAEVKKPGA | DIQMTQSPSSLSASV |
| | YMY | RGATNY | MDVW (SEQ | GSWLA | QS | TPPTF | SVKVSCKASGYTLTTW | GDRVTITCRASDNIG |
| | (SEQ | A (SEQ | ID NO: | (SEQ | (SEQ | (SEQ | YMYWVRQAPGQGLEWM | SWLAWYQQKPGKAPK |
| | ID NO: | ID NO: | 118) | ID NO: | ID | ID NO: | GWINPNRGATNYAQKF | LLIYAASSLQSGVPS |
| | 116) | 117) | | 119) | NO: | 120) | QGRVTMTRDTSTSTVY | RFSGSGSGTDFTLTI |
| | | | | | 65) | | MELSSLRSEDTAVYYC | SSLQPEDFATYYCQQ |
| | | | | | | | AKGDLWGAMDVWGQGT | GYSTPPTFGQGTKVE |
| | | | | | | | LVTVSS (SEQ ID | IK (SEQ ID NO: |
| | | | | | | | NO: 436) | 437) |
| 13. | YTFTTY | GGFDPE | CARHAVAGA | RASESI | AASTL | CQQSYS | QVQLVQSGAEVKKPGA | DIQMTQSPSSLSASV |
| | YMH | DGETIY | VGAGYYYYG | SNWLA | QS | VPFTF | SVKVSCKASGYTFTTY | GDRVTITCRASESIS |
| | (SEQ | A (SEQ | MDVW (SEQ | (SEQ | (SEQ | (SEQ | YMHWVRQAPGQGLEWM | NWLAWYQQKPGKAPK |
| | ID NO: | ID NO: | ID NO: | ID NO: | ID | ID NO: | GGFDPEDGETIYAQKF | LLIYAASTLQSGVPS |
| | 122) | 123) | 124) | 125) | NO: | 126) | QGRVTMTRDTSTSTVY | RFSGSGSGTDFTLTI |
| | | | | | 113) | | MELSSLRSEDTAVYYC | SSLQPEDFATYYCQQ |
| | | | | | | | ARHAVAGAVGAGYYYY | SYSVPFTFGPGTKVD |
| | | | | | | | GMDVWGQGTMVTVSS | IK (SEQ ID NO: |
| | | | | | | | (SEQ ID NO: 438) | 439) |
| 14. | YTFTNY | GGIIPI | CAKGQFTGN | QANQDI | SKLEA | QQSSEI | QVQLVQSGAEVKKPGS | DIQMTQSPSSLSASV |
| | YMH | VDGVKY | YYYGMDYW | SNYLN | (SEQ | PYS | SVKVSCKASGYTFTNY | GDRVTITCQANQDIS |
| | (SEQ | A (SEQ | (SEQ ID | (SEQ | ID | (SEQ | YMHWVRQAPGQGLEWM | NYLNWYQQKPGKAPK |
| | ID NO: | ID NO: | NO: 441) | ID NO: | NO: | ID NO: | GGIIPIVDGVKYAQKF | LLIYRASKLEAGVPS |
| | 148) | 440) | | 151) | 442) | 443) | QGRVTITADESTSTAY | RFSGSGSGTDFTLTI |
| | | | | | | | MELSSLRSEDTAVYYC | SSLQPEDFATYYCQQ |
| | | | | | | | AKGQFTGNYYYGMDYW | SSEIPYSFGQGTKVE |
| | | | | | | | GQGTLVTVSS (SEQ | IK (SEQ ID NO: |
| | | | | | | | ID NO: 444) | 445) |
| 15. | YTFTGY | GWIGPN | CARDLDHNW | RSSQSL | SSSNR | CMQALH | QVQLVQSGAEVKKPGA | DIVMTQSPLSLPVTP |
| | YMH | SGDTNY | YFDLW | LHSNGY | AP | IPLTF | SVKVSCKASGYTFTGY | GEPASISCRSSQSLL |
| | (SEQ | A (SEQ | (SEQ ID | NYLD | (SEQ | (SEQ | YMHWVRQAPGQGLEWM | HSNGYNYLDWYLQKP |
| | ID NO: | ID NO: | NO: 130) | (SEQ | ID | ID NO: | GWIGPNSGDTNYAQKF | GQSPQLLIYSSSNRA |
| | 128) | 129) | | ID NO: | NO: | 133) | QGRVTMTRDTSTSTVY | PGVPDRFSGSGSGTD |
| | | | | 131) | 132) | | MELSSLRSEDTAVYYC | FTLKISRVEAEDVGV |
| | | | | | | | ARDLDHNWYFDLWGRG | YYCMQALHIPLTFGG |
| | | | | | | | TLVTVSS (SEQ ID | GTKVEIK (SEQ ID |
| | | | | | | | NO: 446) | NO: 447) |
| 16. | FTFDDY | SYIDAS | CAKDQAAAG | QASQDI | KASTL | CQQSYS | EVQLLESGGGLVQPGG | DIQMTQSPSSLSASV |
| | AMH | GTTIYY | YWYFDLW | SNYLN | ES | TPITF | SLRLSCAASGFTFDDY | GDRVTITCQASQDIS |
| | (SEQ | A (SEQ | (SEQ ID | (SEQ | (SEQ | (SEQ | AMHWVRQAPGKGLEWV | NYLNWYQQKPGKAPK |
| | ID NO: | ID NO: | NO: 137) | ID NO: | ID | ID NO: | SYIDASGTTIYYADSV | LLIYKASTLESGVPS |
| | 135) | 136) | | 138) | NO: | 140) | KGRFTISRDNSKNTLY | RFSGSGSGTDFTLTI |
| | | | | | 139) | | LQMNSLRAEDTAVYYC | SSLQPEDFATYYCQQ |
| | | | | | | | AKDQAAAGYWYFDLWG | SYSTPITFGQGTRLE |
| | | | | | | | RGTLVTVSS (SEQ | IK (SEQ ID NO: |
| | | | | | | | ID NO: 448) | 449) |
| 17. | YTFTDY | GGIVPR | CAICDESSGW | RSSQSL | SAYNR | CMQALQ | QVQLVQSGAEVKKPGS | DIVMTQSPLSLPVTP |
| | HIH | SGSTTY | YYFDYW | LHSNGY | AS | TPLTF | SVKVSCKASGYTFTDY | GEPASISCRSSQSLL |
| | (SEQ | A (SEQ | (SEQ ID | NYLD | (SEQ | (SEQ | HIHWVRQAPGQGLEWM | HSNGYNYLDWYLQKP |
| | ID NO: | ID NO: | NO: 144) | (SEQ | ID | ID NO: | GGIVPRSGSTTYAQKF | GQSPQLLIYSAYNRA |
| | 142) | 143) | | ID NO: | NO: | 146) | QGRVTITADESTSTAY | SGVPDRFSGSGSGTD |
| | | | | 131) | 145) | | MELSSLRSEDTAVYYC | FTLKISRVEAEDVGV |
| | | | | | | | AKDESSGWYYFDYWGQ | YYCMQALQTPLTFGQ |
| | | | | | | | GTLVTVSS (SEQ ID | GTKVEIK (SEQ ID |
| | | | | | | | NO: 450) | NO: 451) |
| 18. | YTFTNY | GGIIPI | CAKGRYTVN | QANQDI | RASKL | CQQSSE | QVQLVQSGAEVKKPGS | DIQMTQSPSSLSASV |
| | YMH | VDRVKY | YYYGMDVW | SNYLN | EA | IPYSF | SVKVSCKASGYTFTNY | GDRVTITCQANQDIS |
| | (SEQ | A (SEQ | (SEQ ID | (SEQ | (SEQ | (SEQ | YMHWVRQAPGQGLEWM | NYLNWYQQKPGKAPK |
| | ID NO: | ID NO: | NO: 150) | ID NO: | ID | ID NO: | GGIIPIVDRVKYAQKF | LLIYRASKLEAGVPS |
| | 148) | 149) | | 151) | NO: | 153) | QGRVTITADESTSTAY | RFSGSGSGTDFTLTI |
| | | | | | 152) | | MELSSLRSEDTAVYYC | SSLQPEDFATYYCQQ |
| | | | | | | | AKGRYTVNYYYGMDVW | SSEIPYSFGQGTKLE |
| | | | | | | | GQGTTVTVSS (SEQ | IK (SEQ ID NO: |
| | | | | | | | ID NO: 452) | 453) |
| 19. | FTFEDY | SYLNSD | CAKDYCTNG | RASQSI | DASNL | CQQSYT | EVQLLESGGGLVQPGG | DIQMTQSPSSLSASV |
| | AMH | GGSTSY | VCAFDYW | STYLN | ET | IPITF | SLRLSCAASGFTFEDY | GDRVTITCRASQSIS |
| | (SEQ | A (SEQ | (SEQ ID | (SEQ | (SEQ | (SEQ | AMHWVRQAPGKGLEWV | TYLNWYQQKPGKAPK |
| | ID NO: | ID NO: | NO: 157) | ID NO: | ID | ID NO: | SYLNSDGGSTSYADSV | LLIYDASNLETGVPS |
| | 155) | 156) | | 158) | NO: | 160) | KGRFTISRDNSKNTLY | RFSGSGSGTDFTLTI |
| | | | | | 159) | | LQMNSLRAEDTAVYYC | SSLQPEDFATYYCQQ |
| | | | | | | | AKDYCTNGVCAFDYWG | SYTIPITFGQGTRLE |
| | | | | | | | QGTLVTVSS (SEQ | IK (SEQ ID NO: |
| | | | | | | | ID NO: 454) | 455) |
| 20. | FTFSDS | SAISGS | CVSDIAVAG | RASQSI | AASRL | CQQANS | EVQLLESGGGLVQPGG | DIQMTQSPSSLSASV |
| | AMH | GSTIYY | HWYFDLW | STFLN | EG | FPLTF | SLRLSCAASGFTFSDS | GDRVTITCRASQSIS |
| | (SEQ | A (SEQ | (SEQ ID | (SEQ | (SEQ | (SEQ | AMHWVRQAPGKGLEWV | TFLNWYQQKPGKAPK |
| | ID NO: | ID NO: | NO: 164) | ID NO: | ID | ID NO: | SAISGSGSTIYYADSV | LLIYAASRLEGGVPS |
| | 162) | 163) | | 165) | NO: | 167) | KGRFTISRDNSKNTLY | RFSGSGSGTDFTLTI |
| | | | | | 166) | | LQMNSLRAEDTAVYYC | SSLQPEDFATYYCQQ |
| | | | | | | | VSDIAVAGHWYFDLWG | ANSFPLTFGPGTKVD |
| | | | | | | | RGTLVTVSS (SEQ | IK (SEQ ID NO: |
| | | | | | | | ID NO: 456) | 457) |
| 21. | FTFSSY | SYISGD | CARANSSGW | RASQSI | AASSL | CQQSYS | EVQLVESGGGLVKPGG | DIQMTQSPSSLSASV |
| | WMS | SGYTNY | YDWYFDLW | SSYLN | QS | TPLTF | SLRLSCAASGFTFSSY | GDRVTITCRASQSIS |
| | (SEQ | A (SEQ | (SEQ ID | (SEQ | (SEQ | (SEQ | WMSWVRQAPGKGLEWV | SYLNWYQQKPGKAPK |
| | ID NO: | ID NO: | NO: 171) | ID NO: | ID | ID NO: | SYISGDSGYTNYAAPV | LLIYAASSLQSGVPS |
| | 169) | 170) | | 172) | NO: | 173) | KGRFTISRDDSKNTLY | RFSGSGSGTDFTLTI |
| | | | | | 65) | | LQMNSLKTEDTAVYYC | SSLQPEDFATYYCQQ |
| | | | | | | | ARANSSGWYDWYFDLW | SYSTPLTFGGGTKVE |
| | | | | | | | GRGTLVTVSS (SEQ | IK (SEQ ID NO: |
| | | | | | | | ID NO: 458) | 459) |
| 22. | FTFDDY | SGISWN | CAKDIVAAG | QASQDI | DASNL | CQQSYS | EVQLLESGGGLVQPGG | DIQMTQSPSSLSASV |
| | AMH | SGSIGY | HYYYGMDVW | SNYLN | ET | TPLTF | SLRLSCAASGFTFDDY | GDRVTITCQASQDIS |
| | (SEQ | A (SEQ | (SEQ ID | (SEQ | (SEQ | (SEQ | AMHWVRQAPGKGLEWV | NYLNWYQQKPGKAPK |
| | ID NO: | ID NO: | NO: 176) | ID NO: | ID | ID NO: | SGISWNSGSIGYADSV | LLIYDASNLETGVPS |
| | 135) | 175) | | 138) | NO: | 173) | KGRFTISRDNSKNTLY | RFSGSGSGTDFTLTI |
| | | | | | 159) | | LQMNSLRAEDTAVYYC | SSLQPEDFATYYCQQ |
| | | | | | | | AKDIVAAGHYYYGMDV | SYSTPLTFGGGTKVE |
| | | | | | | | WGQGTTVTVSS (SEQ | IK (SEQ ID NO: |
| | | | | | | | ID NO: 460) | 461) |
| 23. | FTFDDY | SYIDTS | CARDEAAAG | QAGQDI | DASNL | CQQTYS | EVQLLESGGGLVQPGG | DIQMTQSPSSLSASV |
| | AMH | SSHLYY | YYGMDVW | SNYLN | ET | TPITF | SLRLSCAASGFTFDDY | GDRVTITCQAGQDIS |
| | (SEQ | A (SEQ | (SEQ ID | (SEQ | (SEQ | (SEQ | AMHWVRQAPGKGLEWV | NYLNWYQQKPGKAPK |
| | ID NO: | ID NO: | NO: 179) | ID NO: | ID | ID NO: | SYIDTSSSHLYYADSV | LLIYDASNLETGVPS |
| | 135) | 178) | | 180) | NO: | 181) | KGRFTISRDNSKNTLY | RFSGSGSGTDFTLTI |
| | | | | | 159) | | LQMNSLRAEDTAVYYC | SSLQPEDFATYYCQQ |
| | | | | | | | ARDEAAAGYYGMDVWG | TYSTPITFGQGTKLE |
| | | | | | | | QGTTVTVSS (SEQ | IK (SEQ ID NO: |
| | | | | | | | ID NO: 462) | 463) |
| 24. | FTFSSY | SRISSD | CARGTSYCT | RASQSI | SNLQS | QQSYSI | EVQLVESGGGLVKPGG | DIQMTQSPSSLSASV |
| | WMS | GRITTY | GGVCDIDYW | GRNLN | (SEQ | PLT | SLRLSCAASGFTFSSY | GDRVTITCRASQSIG |
| | (SEQ | A (SEQ | (SEQ ID | (SEQ | ID | (SEQ | WMSWVRQAPGKGLEWV | RNLNWYQQKPGKAPK |
| | ID NO: | ID NO: | NO: 465) | ID NO: | NO: | ID NO: | SRISSDGRITTYAAPV | LLIYSASNLQSGVPS |
| | 169) | 464) | | 466) | 467) | 468) | KGRFTISRDDSKNTLY | RFSGSGSGTDFTLTI |
| | | | | | | | LQMNSLKTEDTAVYYC | SSLQPEDFATYYCQQ |
| | | | | | | | ARGTSYCTGGVCDIDY | SYSIPLTFGPGTKVD |
| | | | | | | | WGQGTLVTVSS (SEQ | IK (SEQ ID NO: |
| | | | | | | | ID NO: 469) | 470) |
| 25. | FTFSNA | STIVGN | CARDNPLRW | RASQDI | AASSL | CQQSYS | EVQLLESGGGLVQPGG | DIQMTQSPSSLSASV |
| | WMS | GGATYY | QGMDVW | SNYLN | QS | IPPTF | SLRLSCAASGFTFSNA | GDRVTITCRASQDIS |
| | (SEQ | A (SEQ | (SEQ ID | (SEQ | (SEQ | (SEQ | WMSWVRQAPGKGLEWV | NYLNWYQQKPGKAPK |
| | ID NO: | ID NO: | NO: 185) | ID NO: | ID | ID NO: | STIVGNGGATYYADSV | LLIYAASSLQSGVPS |
| | 183) | 184) | | 186) | NO: | 187) | KGRFTISRDNSKNTLY | RFSGSGSGTDFTLTI |
| | | | | | 65) | | LQMNSLRAEDTAVYYC | SSLQPEDFATYYCQQ |
| | | | | | | | ARDNPLRWQGMDVWGQ | SYSIPPTFGPGTKVD |
| | | | | | | | GTLVTVSS (SEQ ID | IK (SEQ ID NO: |
| | | | | | | | NO: 471) | 472) |
| 26. | FTFSSY | SYISSS | CARANSSSW | RASQSI | SGLQS | QQSYST | EVQLLESGGGLVQPGG | DIQMTQSPSSLSASV |
| | AMS | STYTNY | YDWYFDLW | SSYLN | (SEQ | PLT | SLRLSCAASGFTFSSY | GDRVTITCRASQSIS |
| | (SEQ | A (SEQ | (SEQ ID | (SEQ | ID | (SEQ | AMSWVRQAPGKGLEWV | SYLNWYQQKPGKAPK |
| | ID NO: | ID NO: | NO: 191) | ID NO: | NO: | ID NO: | SYISSSSTYTNYADSV | LLIYAASGLQSGVPS |
| | 473) | 190) | | 172) | 474) | 429) | KGRFTISRDNSKNTLY | RFSGSGSGTDFTLTI |
| | | | | | | | LQMNSLRAEDTAVYYC | SSLQPEDFATYYCQQ |
| | | | | | | | ARANSSSWYDWYFDLW | SYSTPLTFGGGTKVE |
| | | | | | | | GQGTLVTVSS (SEQ | IK (SEQ ID NO: |
| | | | | | | | ID NO: 475) | 476) |
| 27. | FTFSSY | SYISSS | CARANSSSW | RASQSI | SGLQS | QQSYST | EVQLLESGGGLVQPGG | DIQMTQSPSSLSASV |
| | QMS | STYTNY | YDWYFDLW | SSYLN | (SEQ | PLT | SLRLSCAASGFTFSSY | GDRVTITCRASQSIS |
| | (SEQ | A (SEQ | (SEQ ID | (SEQ | ID | (SEQ | QMSWVRQAPGKGLEWV | SYLNWYQQKPGKAPK |
| | ID NO: | ID NO: | NO: 191) | ID NO: | NO: | ID NO: | SYISSSSTYTNYADSV | LLIYAASGLQSGVPS |
| | 189) | 190) | | 172) | 474) | 429) | KGRFTISRDNSKNTLY | RFSGSGSGTDFTLTI |
| | | | | | | | LQMNSLRAEDTAVYYC | SSLQPEDFATYYCQQ |
| | | | | | | | ARANSSSWYDWYFDLW | SYSTPLTFGGGTKVE |
| | | | | | | | GQGTLVTVSS (SEQ | IK (SEQ ID NO: |
| | | | | | | | ID NO: 477) | 476) |
| 28. | FTFSSY | SYISSS | CARANSSSW | RASQSI | SSLQS | QQSYST | EVQLLESGGGLVQPGG | DIQMTQSPSSLSASV |
| | AMS | STYTNY | YDWYFDLW | SSYLN | (SEQ | PLT | SLRLSCAASGFTFSSY | GDRVTITCRASQSIS |
| | (SEQ | A (SEQ | (SEQ ID | (SEQ | ID | (SEQ | AMSWVRQAPGKGLEWV | SYLNWYQQKPGKAPK |
| | ID NO: | ID NO: | NO: 191) | ID NO: | NO: | ID NO: | SYISSSSTYTNYADSV | LLIYAASSLQSGVPS |
| | 473) | 190) | | 172) | 362) | 429) | KGRFTISRDNSKNTLY | RFSGSGSGTDFTLTI |
| | | | | | | | LQMNSLRAEDTAVYYC | SSLQPEDFATYYCQQ |
| | | | | | | | ARANSSSWYDWYFDLW | SYSTPLTFGGGTKVE |
| | | | | | | | GQGTLVTVSS (SEQ | IK (SEQ ID NO: |
| | | | | | | | ID NO: 475) | 459) |
| 29. | FTFSSY | SYISSS | CARANSSSW | RASQSI | AASSL | CQQSYS | EVQLLESGGGLVQPGG | DIQMTQSPSSLSASV |
| | QMS | STYTNY | YDWYFDLW | SSYLN | QS | TPLTF | SLRLSCAASGFTFSSY | GDRVTITCRASQSIS |
| | (SEQ | A (SEQ | (SEQ ID | (SEQ | (SEQ | (SEQ | QMSWVRQAPGKGLEWV | SYLNWYQQKPGKAPK |
| | ID NO: | ID NO: | NO: 191) | ID NO: | ID | ID NO: | SYISSSSTYTNYADSV | LLIYAASSLQSGVPS |
| | 189) | 190) | | 172) | NO: | 173) | KGRFTISRDNSKNTLY | RFSGSGSGTDFTLTI |
| | | | | | 65) | | LQMNSLRAEDTAVYYC | SSLQPEDFATYYCQQ |
| | | | | | | | ARANSSSWYDWYFDLW | SYSTPLTFGGGTKVE |
| | | | | | | | GQGTLVTVSS (SEQ | IK (SEQ ID NO: |
| | | | | | | | ID NO: 477) | 459) |
| 30. | FTFSSY | SGISGS | CATSQAPVD | RASQSI | AASNL | CQQSYS | EVQLLESGGGLVQPGG | DIQMTQSPSSLSASV |
| | AMH | GGSAYY | YYYYGMDVW | SSWLA | QR | IPITF | SLRLSCAASGFTFSSY | GDRVTITCRASQSIS |
| | (SEQ | A (SEQ | (SEQ ID | (SEQ | (SEQ | (SEQ | AMHWVRQAPGKGLEWV | SWLAWYQQKPGKAPK |
| | ID NO: | ID NO: | NO: 195) | ID NO: | ID | ID NO: | SGISGSGGSAYYADSV | LLIYAASNLQRGVPS |
| | 193) | 194) | | 196) | NO: | 198) | KGRFTISRDNSKNTLY | RFSGSGSGTDFTLTI |
| | | | | | 197) | | LQMNSLRAEDTAVYYC | SSLQPEDFATYYCQQ |
| | | | | | | | ATSQAPVDYYYYGMDV | SYSIPITFGQGTKVE |
| | | | | | | | WGQGTTVTVSS (SEQ | IK (SEQ ID NO: |
| | | | | | | | ID NO: 478) | 479) |
| 31. | FTFSSY | SYISGS | CARVGSSGW | RASQSI | AASSL | CQQSYS | EVQLVESGGGLVKPGG | DIQMTQSPSSLSASV |
| | WMS | SSYTNY | YDWYFDLW | SSYLN | QS | TPLTF | SLRLSCAASGFTFSSY | GDRVTITCRASQSIS |
| | (SEQ | A (SEQ | (SEQ ID | (SEQ | (SEQ | (SEQ | WMSWVRQAPGKGLEWV | SYLNWYQQKPGKAPK |
| | ID NO: | ID NO: | NO: 201) | ID NO: | ID | ID NO: | SYISGSSSYTNYAAPV | LLIYAASSLQSGVPS |
| | 169) | 200) | | 172) | NO: | 173) | KGRFTISRDDSKNTLY | RFSGSGSGTDFTLTI |
| | | | | | 65) | | LQMNSLKTEDTAVYYC | SSLQPEDFATYYCQQ |
| | | | | | | | ARVGSSGWYDWYFDLW | SYSTPLTFGQGTKVE |
| | | | | | | | GRGTLVTVSS (SEQ | IK (SEQ ID NO: |
| | | | | | | | ID NO: 480) | 481) |
| 32. | YTLTTW | GWINPN | CAKGDLWGA | RASDNI | AASSL | CQQGYS | QVQLVQSGAEVKKPGA | DIQMTQSPSSLSASV |
| | YMY | RGATNY | MDVW (SEQ | GSWLA | QS | TPPTF | SVKVSCKASGYTLTTW | GDRVTITCRASDNIG |
| | (SEQ | A (SEQ | ID NO: | (SEQ | (SEQ | (SEQ | YMYWVRQAPGQGLEWM | SWLAWYQQKPGKAPK |
| | ID NO: | ID NO: | 118) | ID NO: | ID | ID NO: | GWINPNRGATNYAQKF | LLIYAASSLQSGVPS |
| | 116) | 117) | | 119) | NO: | 120) | QGRVTMTRDTSTSTVY | RFSGSGSGTDFTLTI |
| | | | | | 65) | | MELSSLRSEDTAVYYC | SSLQPEDFATYYCQQ |
| | | | | | | | AKGDLWGAMDVWGQGT | GYSTPPTFGQGTKVE |
| | | | | | | | LVTVSS (SEQ ID | IK (SEQ ID NO: |
| | | | | | | | NO: 436) | 437) |
| 33. | YTLTTW | GWINPN | CAKGDLWGA | RASDNI | AASSL | CQQGYS | QVQLVQSGAEVKKPGA | DIQMTQSPSSLSASV |
| | YMY | RGATNY | MDVW (SEQ | GSWLA | QS | TPPTF | SVKVSCKASGYTLTTW | GDRVTITCRASDNIG |
| | (SEQ | A (SEQ | ID NO: | (SEQ | (SEQ | (SEQ | YMYWVRQAPGQGLEWM | SWLAWYQQKPGKAPK |
| | ID NO: | ID NO: | 118) | ID NO: | ID | ID NO: | GWINPNRGATNYAQKF | LLIYAASSLQSGVPS |
| | 116) | 117) | | 119) | NO: | 120) | QGRVTMTRDTSTSTVY | RFSGSGSGTDFTLTI |
| | | | | | 65) | | MELSSLRSEDTAVYYC | SSLQPEDFATYYCQQ |
| | | | | | | | AKGDLWGAMDVWGQGT | GYSTPPTFGQGTKVE |
| | | | | | | | TVTVSS (SEQ ID | IK (SEQ ID NO: |
| | | | | | | | NO: 482) | 437) |
| 34. | YTFTGY | GWMNPN | CARDPGFLG | RASQSI | AASSL | CQQSYT | QVQLVQSGAEVKKPGA | DIQMTQSPSSLSASV |
| | YIH | SGNTGY | YCSGGSCYD | SSYLH | QS | APYTF | SVKVSCKASGYTFTGY | GDRVTITCRASQSIS |
| | (SEQ | A (SEQ | GWFDPW | (SEQ | (SEQ | (SEQ | YIHWVRQAPGQGLEWM | SYLHWYQQKPGKAPK |
| | | | | | ID | | GWMNPNSGNTGYAQKF | LLIYAASSLQSGVPS |
| | ID NO: | ID NO: | (SEQ ID | ID NO: | NO: | ID NO: | QGRVTMTRDTSTSTVY | RFSGSGSGTDFTLTI |
| | 204) | 205) | NO: 206) | 207) | 65) | 208) | MELSSLRSEDTAVYYC | SSLQPEDFATYYCQQ |
| | | | | | | | ARDPGFLGYCSGGSCY | SYTAPYTFGQGTKLE |
| | | | | | | | DGWFDPWGQGTLVTVS | IK (SEQ ID NO: |
| | | | | | | | S (SEQ ID NO: | 484) |
| | | | | | | | 483) | |
| 35. | YTFTGY | GWMNPN | CARDPGFLG | RASQSI | AASSL | CQQSYT | QVQLVQSGAEVKKPGA | DIQMTQSPSSLSASV |
| | YIH | SGNTGY | YSSGGSCYD | SSYLH | QS | APYTF | SVKVSCKASGYTFTGY | GDRVTITCRASQSIS |
| | (SEQ | A (SEQ | GWFDPW | (SEQ | (SEQ | (SEQ | YIHWVRQAPGQGLEWM | SYLHWYQQKPGKAPK |
| | ID NO: | ID NO: | (SEQ ID | ID NO: | ID | ID NO: | GWMNPNSGNTGYAQKF | LLIYAASSLQSGVPS |
| | 204) | 205) | NO: 485) | 207) | NO: | 208) | QGRVTMTRDTSTSTVY | RFSGSGSGTDFTLTI |
| | | | | | 65) | | MELSSLRSEDTAVYYC | SSLQPEDFATYYCQQ |
| | | | | | | | ARDPGFLGYSSGGSSY | SYTAPYTFGQGTKLE |
| | | | | | | | DGWFDPWGQGTLVTVS | IK (SEQ ID NO: |
| | | | | | | | S (SEQ ID NO: | 484) |
| | | | | | | | 486) | |
| 36. | FTFDDY | SAISGD | CARDGTVNG | QASQDI | SNLET | QQSYSI | EVQLLESGGGLVQPGG | DIQMTQSPSSLSASV |
| | ALH | GRSTTY | ATGWFDPW | SKYLN | (SEQ | PFT | SLRLSCAASGFTFDDY | GDRVTITCQASQDIS |
| | (SEQ | A (SEQ | (SEQ ID | (SEQ | ID | (SEQ | ALHWVRQAPGKGLEWV | KYLNWYQQKPGKAPK |
| | ID NO: | ID NO: | NO: 489) | ID NO: | NO: | ID NO: | SAISGDGRSTTYADSV | LLIYDASNLETGVPS |
| | 487) | 488) | | 490) | 491) | 492) | KGRFTISRDNSKNTLY | RFSGSGSGTDFTLTI |
| | | | | | | | LQMNSLRAEDTAVYYC | SSLQPEDFATYYCQQ |
| | | | | | | | ARDGTVNGATGWFDPW | SYSIPFTFGPGTKVD |
| | | | | | | | GQGTLVTVSS (SEQ | IK (SEQ ID NO: |
| | | | | | | | ID NO: 493) | 494) |
| 37. | FTFSDY | SAISGS | CARDGGWQP | RASQGI | SNLET | QQSYST | EVQLLESGGGLVQPGG | DIQMTQSPSSLSASV |
| | GMP | GGSTYY | AAILDYW | SNNLN | (SEQ | PLT | SLRLSCAASGFTFSDY | GDRVTITCRASQGIS |
| | (SEQ | A (SEQ | (SEQ ID | (SEQ | ID | (SEQ | GMPWVRQAPGKGLEWV | NNLNWYQQKPGKAPK |
| | ID NO: | ID NO: | NO: 296) | ID NO: | NO: | ID NO: | SAISGSGGSTYYADSV | LLIYDASNLETGVPS |
| | 495) | 103) | | 105) | 491) | 429) | KGRFTISRDNSKNTLY | RFSGSGSGTDFTLTI |
| | | | | | | | LQMNSLRAEDTAVYYC | SSLQPEDFATYYCQQ |
| | | | | | | | ARDGGWQPAAILDYWG | SYSTPLTFGQGTKVE |
| | | | | | | | QGTLVTVSS (SEQ | IK (SEQ ID NO: |
| | | | | | | | ID NO: 496) | 497) |
| 38. | YTFTDY | GWMNPT | CAREGEGSG | RASQGI | DASNL | CQQSYS | QVQLVQSGAEVKKPGA | DIQMTQSPSSLSASV |
| | FLH | SGNTGY | FDYW (SEQ | NSWLA | ET | TPLTF | SVKVSCKASGYTFTDY | GDRVTITCRASQGIN |
| | (SEQ | A (SEQ | ID NO: | (SEQ | (SEQ | (SEQ | FLHWVRQAPGQGLEWM | SWLAWYQQKPGKAPK |
| | ID NO: | ID NO: | 212) | ID NO: | ID | ID NO: | GWMNPTSGNTGYAQKF | LLIYDASNLETGVPS |
| | 210) | 211) | | 213) | NO: | 173) | QGRVTMTRDTSTSTVY | RFSGSGSGTDFTLTI |
| | | | | | 159) | | MELSSLRSEDTAVYYC | SSLQPEDFATYYCQQ |
| | | | | | | | AREGEGSGFDYWGQGT | SYSTPLTFGGGTKVE |
| | | | | | | | LVTVSS (SEQ ID | IK (SEQ ID NO: |
| | | | | | | | NO: 498) | 499) |
| 39. | YTFTSY | AWMNPN | CARDYDFWS | RASQGI | AASSL | CQQSYS | QVQLVQSGAEVKKPGA | DIQMTQSPSSLSASV |
| | YMH | SGNTGY | GSLGYW | SNYLA | QS | TPWTF | SVKVSCKASGYTFTSY | GDRVTITCRASQGIS |
| | (SEQ | A (SEQ | (SEQ ID | (SEQ | (SEQ | (SEQ | YMHWVRQAPGQGLEWM | NYLAWYQQKPGKAPK |
| | ID NO: | ID NO: | NO: 217) | ID NO: | ID | ID NO: | AWMNPNSGNTGYAQKF | LLIYAASSLQSGVPS |
| | 215) | 216) | | 218) | NO: | 114) | QGRVTMTRDTSTSTVY | RFSGSGSGTDFTLTI |
| | | | | | 65) | | MELSSLRSEDTAVYYC | SSLQPEDFATYYCQQ |
| | | | | | | | ARDYDFWSGSLGYWGQ | SYSTPWTFGQGTKVE |
| | | | | | | | GTLVTVSS (SEQ ID | IK (SEQ ID NO: |
| | | | | | | | NO: 500) | 501) |
| 40. | YTLTTW | GWINPN | CAKGDLWGA | RASDNI | AASSL | CQQGYS | QVQLVQSGAEVKKPGA | DIQMTQSPSSLSASV |
| | YMY | RGATNY | MDVW (SEQ | GSWLA | QS | TPPTF | SVKVSCKASGYTLTTW | GDRVTITCRASDNIG |
| | (SEQ | A (SEQ | ID NO: | (SEQ | (SEQ | (SEQ | YMYWVRQAPGQGLEWM | SWLAWYQQKPGKAPK |
| | | | 118) | | ID | | GWINPNRGATNYAQKF | LLIYAASSLQSGVPS |
| | ID NO: | ID NO: | | ID NO: | NO: | ID NO: | QGRVTMTRDTSTSTVY | RFSGSGSGTDFTLTI |
| | 116) | 117) | | 119) | 65) | 120) | MELSSLRSEDTAVYYC | SSLQPEDFATYYCQQ |
| | | | | | | | AKGDLWGAMDVWGQGT | GYSTPPTFGQGTKVE |
| | | | | | | | LVTVSS (SEQ ID | IK (SEQ ID NO: |
| | | | | | | | NO: 436) | 437) |
| 41. | YTFTSY | GIINPS | CARDTGYSY | RASQSI | DASNL | CQQSYS | QVQLVQSGAEVKKPGA | DIQMTQSPSSLSASV |
| | YMH | GGSTSY | GRYYYYGMD | GRWLA | QS | IPITF | SVKVSCKASGYTFTSY | GDRVTITCRASQSIG |
| | (SEQ | A (SEQ | VW (SEQ | (SEQ | (SEQ | (SEQ | YMHWVRQAPGQGLEWM | RWLAWYQQKPGKAPK |
| | ID NO: | ID NO: | ID NO: | ID NO: | ID | ID NO: | GIINPSGGSTSYAQKF | LLIYDASNLQSGVPS |
| | 215) | 69) | 220) | 221) | NO: | 198) | QGRVTMTRDTSTSTVY | RFSGSGSGTDFTLTI |
| | | | | | 222) | | MELSSLRSEDTAVYYC | SSLQPEDFATYYCQQ |
| | | | | | | | ARDTGYSYGRYYYYGM | SYSIPITFGQGTKVE |
| | | | | | | | DVWGQGTLVTVSS | IK (SEQ ID NO: |
| | | | | | | | (SEQ ID NO: 502) | 503) |
| 42. | YTLTDY | GIINPS | CAREEYSSS | RASQGI | AASSL | CQQSYS | QVQLVQSGAEVKKPGA | DIQMTQSPSSLSASV |
| | YMH | GGSTSY | SGYFDYW | SSWLA | QS | TPLTF | SVKVSCKASGYTLTDY | GDRVTITCRASQGIS |
| | (SEQ | A (SEQ | (SEQ ID | (SEQ | (SEQ | (SEQ | YMHWVRQAPGQGLEWM | SWLAWYQQKPGKAPK |
| | ID NO: | ID NO: | NO: 225) | ID NO: | ID | ID NO: | GIINPSGGSTSYAQKF | LLIYAASSLQSGVPS |
| | 224) | 69) | | 226) | NO: | 173) | QGRVTMTRDTSTSTVY | RFSGSGSGTDFTLTI |
| | | | | | 65) | | MELSSLRSEDTAVYYC | SSLQPEDFATYYCQQ |
| | | | | | | | AREEYSSSSGYFDYWG | SYSTPLTFGQGTKVE |
| | | | | | | | QGTLVTVSS (SEQ | IK (SEQ ID NO: |
| | | | | | | | ID NO: 504) | 505) |
| 43. | YTFTSY | GWMHPK | CARDTPYYY | RASQSI | AASSL | CQQSYS | QVQLVQSGAEVKKPGA | DIQMTQSPSSLSASV |
| | GIS | SGDTGL | YGMDVW | SSWLA | QS | VPITF | SVKVSCKASGYTFTSY | GDRVTITCRASQSIS |
| | (SEQ | T (SEQ | (SEQ ID | (SEQ | (SEQ | (SEQ | GISWVRQAPGQGLEWM | SWLAWYQQKPGKAPK |
| | ID NO: | ID NO: | NO: 230) | ID NO: | ID | ID NO: | GWMHPKSGDTGLTQKF | LLIYAASSLQSGVPS |
| | 228) | 229) | | 196) | NO: | 231) | QGRVTMTRDTSTSTVY | RFSGSGSGTDFTLTI |
| | | | | | 65) | | MELSSLRSEDTAVYYC | SSLQPEDFATYYCQQ |
| | | | | | | | ARDTPYYYYGMDVWGQ | SYSVPITFGQGTKVE |
| | | | | | | | GTTVTVSS (SEQ ID | IK (SEQ ID NO: |
| | | | | | | | NO: 506) | 507) |
| 44. | FTFSSY | SAISGS | CAKERFIDY | QASQDI | SSLQS | QQTYSG | EVQLLESGGGLVQPGG | DIQMTQSPSSLSASV |
| | AMS | GGSTYY | GMDVW | SNYLN | (SEQ | WT | SLRLSCAASGFTFSSY | GDRVTITCQASQDIS |
| | (SEQ | A (SEQ | (SEQ ID | (SEQ | ID | (SEQ | AMSWVRQAPGKGLEWV | NYLNWYQQKPGKAPK |
| | ID NO: | ID NO: | NO: 508) | ID NO: | NO: | ID NO: | SAISGSGGSTYYADSV | LLIYAASSLQSGVPS |
| | 473) | 103) | | 138) | 362) | 509) | KGRFTISRDNSKNTLY | RFSGSGSGTDFTLTI |
| | | | | | | | LQMNSLRAEDTAVYYC | SSLQPEDFATYYCQQ |
| | | | | | | | AKERFIDYGMDVWGQG | TYSGWTFGPGTKVDI |
| | | | | | | | TTVTVSS (SEQ ID | K (SEQ ID NO: |
| | | | | | | | NO: 510) | 511) |
| 45. | FTFGDY | SYISGD | CARDVAATG | RASQSI | AASSL | CQQSYS | EVQLVESGGGLVKPGG | DIQMTQSPSSLSASV |
| | AMS | IGYTNY | NWYFDLW | SSYLN | QS | TPLTF | SLRLSCAASGFTFGDY | GDRVTITCRASQSIS |
| | (SEQ | A (SEQ | (SEQ ID | (SEQ | (SEQ | (SEQ | AMSWVRQAPGKGLEWV | SYLNWYQQKPGKAPK |
| | ID NO: | ID NO: | NO: 235) | ID NO: | ID | ID NO: | SYISGDIGYTNYAAPV | LLIYAASSLQSGVPS |
| | 233) | 234) | | 172) | NO: | 173) | KGRFTISRDDSKNTLY | RFSGSGSGTDFTLTI |
| | | | | | 65) | | LQMNSLKTEDTAVYYC | SSLQPEDFATYYCQQ |
| | | | | | | | ARDVAATGNWYFDLWG | SYSTPLTFGGGTKVE |
| | | | | | | | RGTLVTVSS (SEQ | IK (SEQ ID NO: |
| | | | | | | | ID NO: 512) | 459) |
| 46. | FSFSSY | SFITSS | CARDRRGDY | RASQSV | GASTR | CQQYGS | EVQLLESGGGLVQPGG | EIVMTQSPATLSVSP |
| | TMN | SRTIYY | GDSWYFDLW | RNYLA | AT | SPLTF | SLRLSCAASGFSFSSY | GERATLSCRASQSVR |
| | (SEQ | A (SEQ | (SEQ ID | (SEQ | (SEQ | (SEQ | TMNWVRQAPGKGLEWV | NYLAWYQQKPGQAPR |
| | ID NO: | ID NO: | NO: 239) | ID NO: | ID | ID NO: | SFITSSSRTIYYADSV | LLIYGASTRATGIPA |
| | 237) | 238) | | 240) | NO: | 242) | KGRFTISRDNSKNTLY | RFSGSGSGTEFTLTI |
| | | | | | 241) | | LQMNSLRAEDTAVYYC | SSLQSEDFAVYYCQQ |
| | | | | | | | ARDRRGDYGDSWYFDL | YGSSPLTFGGGTKVE |
| | | | | | | | WGRGTLVTVSS (SEQ | IK (SEQ ID NO: |
| | | | | | | | ID NO: 513) | 514) |
| 47. | YTFTGH | GIINPS | CARDTGYSY | RASQSI | DASNL | CQQSYS | QVQLVQSGAEVKKPGA | DIQMTQSPSSLSASV |
| | YMH | GGSTSY | GRYYYYGMD | GRWLA | QS | IPITF | SVKVSCKASGYTFSKH | GDRVTITCRASQSIS |
| | (SEQ | A (SEQ | VW (SEQ | (SEQ | (SEQ | (SEQ | FVHWVRQAPGQGLEWM | SWLAWYQQKPGKAPK |
| | ID NO: | ID NO: | ID NO: | ID NO: | ID | ID NO: | GWMNPNSGNSGYAQKF | LLIYAASTLQSGVPS |
| | 244) | 69) | 220) | 221) | NO: | 198) | QGRVTMTRDTSTSTVY | RFSGSGSGTDFTLTI |
| | | | | | 222) | | MELSSLRSEDTAVYYC | SSLQPEDFATYYCQQ |
| | | | | | | | ARGEGGYYYYGMDVWG | SYSTPWTFGQGTKVE |
| | | | | | | | QGTLVTVSS (SEQ | IK (SEQ ID NO: |
| | | | | | | | ID NO: 515) | 516) |
| 48. | YTFSKH | GWMNPN | CARGEGGYY | RASQSI | AASTL | CQQSYS | EVQLLESGGGLVQPGG | DIQMTQSPSSLSASV |
| | FVH | SGNSGY | YYGMDVW | SSWLA | QS | TPWTF | SLRLSCAASGFTFGSY | GDRVTITCRASQPLS |
| | (SEQ | A (SEQ | (SEQ ID | (SEQ | (SEQ | (SEQ | SMSWVRQAPGKGLEWV | NWLAWYQQKPGKAPK |
| | ID NO: | ID NO: | NO: 248) | ID NO: | ID | ID NO: | SAIGTGGGTYYADSVK | LLIYAASSLQSGVPS |
| | 246) | 247) | | 196) | NO: | 114) | GRFTISRDNSKNTLYL | RFSGSGSGTDFTLTI |
| | | | | | 113) | | QMNSLRAEDTAVYYCA | SSLQPEDFATYYCQQ |
| | | | | | | | KGTPYYYYYGMDVWGQ | AISFPLTFGGGTKVE |
| | | | | | | | GTMVTVSS (SEQ ID | IK (SEQ ID NO: |
| | | | | | | | NO: 517) | 518) |
| 49. | FTFGSY | SAIGTG | CAKGTPYYY | RASQPL | AASSL | CQQAIS | QVQLVQSGAEVKKPGA | DIQMTQSPSSLSASV |
| | SMS | GGTYYA | YYGMDVW | SNWLA | QS | FPLTF | SVKVSCKASGYTFTSY | GDRVTITCQSSEDIS |
| | (SEQ | (SEQ | (SEQ ID | (SEQ | (SEQ | (SEQ | YMHWVRQAPGQGLEWM | SSLNWYQQKPGKAPK |
| | ID NO: | ID NO: | NO: 252) | ID NO: | ID | ID NO: | GWMNPSGNTGYAQKF | LLIYAASSLQIGVPS |
| | 250) | 251) | | 253) | NO: | 254) | QGRVTMTRDTSTSTVY | RFSGSGSGTDFTLTI |
| | | | | | 65) | | MELSSLRSEDTAVYYC | SSLQPEDFATYYCQQ |
| | | | | | | | ARDLGYYDSSGYFGAF | TYSTPYTFGQGTKVE |
| | | | | | | | DIWGQGTTVTVSS | IK (SEQ ID NO: |
| | | | | | | | (SEQ ID NO: 519) | 520) |
| 50. | YTFTSY | GWMNPN | CARDLGYYD | QSSEDI | AASSL | CQQTYS | QVQLVQSGAEVKKPGA | DIQMTQSPSSLSASV |
| | YMH | SGNTGY | SSGYFGAFD | SSSLN | QI | TPYTF | SVKVSCKASGYTFTSY | GDRVTITCRASQGIG |
| | (SEQ | A (SEQ | IW (SEQ | (SEQ | (SEQ | (SEQ | GISWVRQAPGQGLEWM | NWLAWYQQKPGKAPK |
| | ID NO: | ID NO: | ID NO: | ID NO: | ID | ID NO: | GIINPRGGSTIFAQKF | LLIYAASNLETGVPS |
| | 215) | 205) | 256) | 257) | NO: | 259) | QGRVTMTRDTSTSTVY | RFSGSGSGTDFTLTI |
| | | | | | 258) | | MELSSLRSEDTAVYYC | SSLQPEDFATYYCQQ |
| | | | | | | | ARGTRSSGWYGWFDPW | IHSYPLTFGGGTKVE |
| | | | | | | | GQGTLVTVSS (SEQ | IK (SEQ ID NO: |
| | | | | | | | ID NO: 521) | 522) |
| 51. | YTFTSY | GIINPR | CARGTRSSG | RASQGI | AASNL | CQQIHS | EVQLVESGGGLVKPGG | DIVMTQSPLSLPVTP |
| | GIS | GGSTIF | WYGWFDPW | GNWLA | ET | YPLTF | SLRLSCAASGFIFQDS | GEPASISCRSSQSLL |
| | (SEQ | A (SEQ | (SEQ ID | (SEQ | (SEQ | (SEQ | AIHWVRQAPGKGLEWV | HSNGYNYLDWYLQKP |
| | ID NO: | ID NO: | NO: 262) | ID NO: | ID | ID NO: | SAIGTGGGTYYAAPVK | GQSPQLLIYDASNLE |
| | 228) | 261) | | 263) | NO: | 265) | GRFTISRDDSKNTLYL | TGVPDRFSGSGSGTD |
| | | | | | 264) | | QMNSLKTEDTAVYYCA | FTLKISRVEAEDVGV |
| | | | | | | | RSYCSGGSCSLGSWGQ | YYCMQALQTPLTFGQ |
| | | | | | | | GTLVTVSS (SEQ ID | GTKVEIK (SEQ ID |
| | | | | | | | NO: 523) | NO: 524) |
| 52. | FTFDDY | SYISSS | CAREIAAAG | RASQSI | AASSL | CQQSYS | EVQLLESGGGLVQPGG | DIQMTQSPSSLSASV |
| | GMS | SSYIYY | FYGMDVW | SSYLN | QS | TPLTF | SLRLSCAASGFTFDDY | GDRVTITCRASQSIS |
| | (SEQ | A (SEQ | (SEQ ID | (SEQ | (SEQ | (SEQ | GMSWVRQAPGKGLEWV | SYLNWYQQKPGKAPK |
| | ID NO: | ID NO: | NO: 269) | ID NO: | ID | ID NO: | SYISSSSSYIYYADSV | LLIYAASSLQSGVPS |
| | 267) | 268) | | 172) | NO: | 173) | KGRFTISRDNSKNTLY | RFSGSGSGTDFTLTI |
| | | | | | 65) | | LQMNSLRAEDTAVYYC | SSLQPEDFATYYCQQ |
| | | | | | | | AREIAAAGFYGMDVWG | SYSTPLTFGGGTKVE |
| | | | | | | | QGTTVTVSS (SEQ | IK (SEQ ID NO: |
| | | | | | | | ID NO: 525) | 459) |
| 53. | YTFTSY | GWMNPN | CAREGLGYC | RASQGI | SSLQS | QQSYST | QVQLVQSGAEVKKPGA | DIQMTQSPSSLSASV |
| | YMH | SGNTGY | TNGVCWNYY | SSWLA | (SEQ | PYT | SVKVSCKASGYTFTSY | GDRVTITCRASQGIS |
| | (SEQ | A (SEQ | GMDVW | (SEQ | ID | (SEQ | YMHWVRQAPGQGLEWM | SWLAWYQQKPGKAPK |
| | ID NO: | ID NO: | (SEQ ID | ID NO: | NO: | ID NO: | GWMNPNSGNTGYAQKF | LLIYGASSLQSGVPS |
| | 215) | 205) | NO: 526) | 226) | 362) | 527) | QGRVTMTRDTSTSTVY | RFSGSGSGTDFTLTI |
| | | | | | | | MELSSLRSEDTAVYYC | SSLQPEDFATYYCQQ |
| | | | | | | | AREGLGYCTNGVCWNY | SYSTPYTFGQGTKVE |
| | | | | | | | YGMDVWGQGTLVTVSS | IK (SEQ ID NO: |
| | | | | | | | (SEQ ID NO: 528) | 529) |
| 54. | GTLSRY | GGIIPI | CARDRVYYD | RASQSV | GASTR | CQQYGS | QVQLVQSGAEVKKPGS | EIVMTQSPATLSVSP |
| | GVS | FGTTNY | SSGYPTWYF | SSSYLA | AT | SPITF | SVKVSCKASGGTLSRY | GERATLSCRASQSVS |
| | (SEQ | A (SEQ | DLW (SEQ | (SEQ | (SEQ | (SEQ | GVSWVRQAPGQGLEWM | SSYLAWYQQKPGQAP |
| | ID NO: | ID NO: | ID NO: | ID NO: | ID | ID NO: | GGIIPIFGTTNYAQKF | RLLIYGASTRATGIP |
| | 271) | 272) | 273) | 274) | NO: | 275) | QGRVTITADESTSTAY | ARFSGSGSGTEFTLT |
| | | | | | 241) | | MELSSLRSEDTAVYYC | ISSLQSEDFAVYYCQ |
| | | | | | | | ARDRVYYDSSGYPTWY | QYGSSPITFGQGTKV |
| | | | | | | | FDLWGRGTLVTVSS | EIK (SEQ ID NO: |
| | | | | | | | (SEQ ID NO: 530) | 531) |
| 55. | FTFDDF | SGISGN | CARDASYGG | QASQDI | KASTL | CQQANS | EVQLLESGGGLVQPGG | DIQMTQSPSSLSASV |
| | AMH | GDSRYY | NYGMDVW | RNYLN | ES | FPLTF | SLRLSCAASGFTFDDF | GDRVTITCQASQDIR |
| | (SEQ | A (SEQ | (SEQ ID | (SEQ | (SEQ | (SEQ | AMHWVRQAPGKGLEWV | NYLNWYQQKPGKAPK |
| | ID NO: | ID NO: | NO: 279) | ID NO: | ID | ID NO: | SGISGNGDSRYYADSV | LLIYKASTLESGVPS |
| | 277) | 278) | | 280) | NO: | 167) | KGRFTISRDNSKNTLY | RFSGSGSGTDFTLTI |
| | | | | | 139) | | LQMNSLRAEDTAVYYC | SSLQPEDFATYYCQQ |
| | | | | | | | ARDASYGGNYGMDVWG | ANSFPLTFGPGTKVD |
| | | | | | | | QGTTVTVSS (SEQ | IK (SEQ ID NO: |
| | | | | | | | ID NO: 532) | 533) |
| 56. | FTFSSY | SAIGTG | CAREWLVPY | RASQSI | GASNL | CQQSYS | EVQLVESGGGLVKPGG | DIQMTQSPSSLSASV |
| | WMS | GGTYYA | YGMDVW | SRWLA | QS | TPWTF | SLRLSCAASGFTFSSY | GDRVTITCRASQSIS |
| | (SEQ | (SEQ | (SEQ ID | (SEQ | (SEQ | (SEQ | WMSWVRQAPGKGLEWV | RWLAWYQQKPGKAPK |
| | ID NO: | ID NO: | NO: 282) | ID NO: | ID | ID NO: | SAIGTGGGTYYAAPVK | LLIYGASNLQSGVPS |
| | 169) | 251) | | 283) | NO: | 114) | GRFTISRDDSKNTLYL | RFSGSGSGTDFTLTI |
| | | | | | 284) | | QMNSLKTEDTAVYYCA | SSLQPEDFATYYCQQ |
| | | | | | | | REWLVPYYGMDVWGQG | SYSTPWTFGQGTKVE |
| | | | | | | | TTVTVSS (SEQ ID | IK (SEQ ID NO: |
| | | | | | | | NO: 534) | 535) |
| 57. | FSVSSN | AGISYD | CARSRGIAA | KSSQSV | WASTR | CHQYYG | EVQLLESGGGLVQPGG | DIVMTQSPDSLAVSL |
| | YMS | GSSKPY | RPLQHW | LYSSNN | QS | HPPTF | SLRLSCAASGFSVSSN | GERATINCKSSQSVL |
| | (SEQ | A (SEQ | (SEQ ID | KNYLA | (SEQ | (SEQ | YMSWVRQAPGKGLEWV | YSSNNKNYLAWYQQK |
| | ID NO: | ID NO: | NO: 288) | (SEQ | ID | ID NO: | AGISYDGSSKPYADSV | PGQPPKLLIYWASTR |
| | 286) | 287) | | ID NO: | NO: | 291) | KGRFTISRDNSKNTLY | QSGVPDRFSGSGSGT |
| | | | | 289) | 290) | | LQMNSLRAEDTAVYYC | DFTLTISSLQAEDVA |
| | | | | | | | ARSRGIAARPLQHWGQ | VYYCHQYYGHPPTFG |
| | | | | | | | GTLVTVSS (SEQ ID | GGTKVEIK (SEQ |
| | | | | | | | NO: 536) | ID NO: 537) |
| 58. | FSVSSN | AGISYD | CARSRGIAA | KSSQSV | QASTR | CHQYYG | EVQLLESGGGLVQPGG | DIVMTQSPDSLAVSL |
| | YMS | GSSKPY | RPLQHW | LYSSNN | QS | HPPTF | SLRLSCAASGFSVSSN | GERATINCKSSQSVL |
| | (SEQ | A (SEQ | (SEQ ID | KNYLA | (SEQ | (SEQ | YMSWVRQAPGKGLEWV | YSSNNKNYLAWYQQK |
| | ID NO: | ID NO: | NO: 288) | (SEQ | ID | ID NO: | AGISYDGSSKPYADSV | PGQPPKLLIYQASTR |
| | 286) | 287) | | ID NO: | NO: | 291) | KGRFTISRDNSKNTLY | QSGVPDRFSGSGSGT |
| | | | | 289) | 293) | | LQMNSLRAEDTAVYYC | DFTLTISSLQAEDVA |
| | | | | | | | ARSRGIAARPLQHWGQ | VYYCHQYYGHPPTFG |
| | | | | | | | GTLVTVSS (SEQ ID | GGTKVEIK (SEQ |
| | | | | | | | NO: 536) | ID NO: 538) |
| 59. | FSFSDY | SAISGS | CARDGGWQP | RASQGI | DASNL | CQQSYS | EVQLLESGGGLVQPGG | DIQMTQSPSSLSASV |
| | GMH | GGSTYY | AAILDYW | SNNLN | ET | TPLTF | SLRLSCAASGFSFSDY | GDRVTITCRASQGIS |
| | (SEQ | A (SEQ | (SEQ ID | (SEQ | (SEQ | (SEQ | GMHWVRQAPGKGLEWV | NNLNWYQQKPGKAPK |
| | ID NO: | ID NO: | NO: 296) | ID NO: | ID | ID NO: | SAISGSGGSTYYADSV | LLIYDASNLETGVPS |
| | 295) | 103) | | 105) | NO: | 173) | KGRFTISRDNSKNTLY | RFSGSGSGTDFTLTI |
| | | | | | 159) | | LQMNSLRAEDTAVYYC | SSLQPEDFATYYCQQ |
| | | | | | | | ARDGGWQPAAILDYWG | SYSTPLTFGGGTKVE |
| | | | | | | | QGTLVTVSS (SEQ | IK (SEQ ID NO: |
| | | | | | | | ID NO: 539) | 540) |
| 60. | FTFSDH | SVIYGG | CARDPAVAG | RASQGI | DASNL | CQQSYS | EVQLLESGGGLVQPGG | DIQMTQSPSSLSASV |
| | GMH | ESTYYA | GGIFDYW | SNYLA | ET | TCYTF | SLRLSCAASGFTFSDH | GDRVTITCRASQGIS |
| | (SEQ | (SEQ | (SEQ ID | (SEQ | (SEQ | (SEQ | GMHWVRQAPGKGLEWV | NYLAWYQQKPGKAPK |
| | ID NO: | ID NO: | NO: 300) | ID NO: | ID | ID NO: | SVIYGGESTYYADSVK | LLIYDASNLETGVPS |
| | 298) | 299) | | 218) | NO: | 301) | GRFTISRDNSKNTLYL | RFSGSGSGTDFTLTI |
| | | | | | 159) | | QMNSLRAEDTAVYYCA | SSLQPEDFATYYCQQ |
| | | | | | | | RDPAVAGGGIFDYWGQ | SYSTCYTFGQGTKLE |
| | | | | | | | GTLVTVSS (SEQ ID | IK (SEQ ID NO: |
| | | | | | | | NO: 541) | 542) |
| 61. | DTFTGY | GWINPN | CARSGLWLG | RASQTI | DASTL | CQQYSS | QVQLVQSGAEVKKPGA | DIQMTQSPSSLSASV |
| | YIH | SGGTNY | SYYGMDVW | SIWLA | QS | YPLTF | SVKVSCKASGDTFTGY | GDRVTITCRASQTIS |
| | (SEQ | A (SEQ | (SEQ ID | (SEQ | (SEQ | (SEQ | YIHWVRQAPGQGLEWM | IWLAWYQQKPGKAPK |
| | ID NO: | ID NO: | NO: 305) | ID NO: | ID | ID NO: | GWINPNSGGTNYAQKF | LLIYDASTLQSGVPS |
| | 303) | 304) | | 306) | NO: | 308) | QGRVTMTRDTSTSTVY | RFSGSGSGTDFTLTI |
| | | | | | 307) | | MELSSLRSEDTAVYYC | SSLQPEDFATYYCQQ |
| | | | | | | | ARSGLWLGSYYGMDVW | YSSYPLTFGQGTKVE |
| | | | | | | | GQGTLVTVSS (SEQ | IK (SEQ ID NO: |
| | | | | | | | ID NO: 543) | 544) |
| 62. | YTFTSY | GWINPN | CARSPYYYY | RASHFI | AASTL | CQQSYS | QVQLVQSGAEVKKPGA | DIQMTQSPSSLSASV |
| | DIN | SGTTGY | GMDVW | SRWVA | QS | GISF | SVKVSCKASGYTFTSY | GDRVTITCRASHFIS |
| | (SEQ | A (SEQ | (SEQ ID | (SEQ | (SEQ | (SEQ | DINWVRQAPGQGLEWM | RWVAWYQQKPGKAPK |
| | ID NO: | ID NO: | NO: 312) | ID NO: | ID | ID NO: | GWINPNSGTTGYAQKF | LLIYAASTLQSGVPS |
| | 310) | 311) | | 313) | NO: | 314) | QGRVTMTRDTSTSTVY | RFSGSGSGTDFTLTI |
| | | | | | 113) | | MELSSLRSEDTAVYYC | SSLQPEDFATYYCQQ |
| | | | | | | | ARSPYYYYGMDVWGQG | SYSGISFGPGTKVDI |
| | | | | | | | TTVTVSS (SEQ ID | K (SEQ ID NO: |
| | | | | | | | NO: 545) | 546) |
| 63. | FTFNNY | SRINSD | CARGAYYYY | RASQSV | ATSSR | CQQYYS | EVQLLESGGGLVQPGG | EIVMTQSPATLSVSP |
| | GMN | GSSTSY | YMDVW | SGSYLA | AS | GLTF | SLRLSCAASGFTFNNY | GERATLSCRASQSVS |
| | (SEQ | A (SEQ | (SEQ ID | (SEQ | (SEQ | (SEQ | GMNWVRQAPGKGLEWV | GSYLAWYQQKPGQAP |
| | ID NO: | ID NO: | NO: 318) | ID NO: | ID | ID NO: | SRINSDGSSTSYADSV | RLLIYATSSRASGIP |
| | 316) | 317) | | 319) | NO: | 321) | KGRFTISRDNSKNTLY | ARFSGSGSGTEFTLT |
| | | | | | 320) | | LQMNSLRAEDTAVYYC | ISSLQSEDFAVYYCQ |
| | | | | | | | ARGAYYYYYMDVWGQG | QYYSGLTFGQGTKVE |
| | | | | | | | TLVTVSS (SEQ ID | IK (SEQ ID NO: |
| | | | | | | | NO: 547) | 548) |
| 64. | FTFSNS | AHIWND | CARDRTDPG | RASQDI | DASSL | CQQATS | EVQLLESGGGLVQPGG | DIQMTQSPSSLSASV |
| | DMN | GSQKYY | YSSAMDVW | RNYLG | ET | LPLTF | SLRLSCAASGFTFSNS | GDRVTITCRASQDIR |
| | (SEQ | A (SEQ | (SEQ ID | (SEQ | (SEQ | (SEQ | DMNWVRQAPGKGLEWV | NYLGWYQQKPGKAPK |
| | ID NO: | ID NO: | NO: 325) | ID NO: | ID | ID NO: | AHIWNDGSQKYYADSV | LLIYDASSLETGVPS |
| | 323) | 324) | | 326) | NO: | 328) | KGRFTISRDNSKNTLY | RFSGSGSGTDFTLTI |
| | | | | | 327) | | LQMNSLRAEDTAVYYC | SSLQPEDFATYYCQQ |
| | | | | | | | ARDRTDPGYSSAMDVW | ATSLPLTFGGGTKVE |
| | | | | | | | GQGTTVTVSS (SEQ | IK (SEQ ID NO: |
| | | | | | | | ID NO: 549) | 550) |
| 65. | YTFTSY | GWMNPN | CAKDSDYSN | RASQDI | QASSL | CQQSYT | QVQLVQSGAEVKKPGA | DIQMTQSPSSLSASV |
| | DIN | SGNTGY | LLWDYW | TNDLG | ES | IPLTF | SVKVSCKASGYTFTSY | GDRVTITCRASQDIT |
| | (SEQ | A (SEQ | (SEQ ID | (SEQ | (SEQ | (SEQ | DINWVRQAPGQGLEWM | NDLGWYQQKPGKAPK |
| | ID NO: | ID NO: | NO: 330) | ID NO: | ID | ID NO: | GWMNPNSGNTGYAQKF | LLIYQASSLESGVPS |
| | 310) | 205) | | 331) | NO: | 333) | QGRVTMTRDTSTSTVY | RFSGSGSGTDFTLTI |
| | | | | | 332) | | MELSSLRSEDTAVYYC | SSLQPEDFATYYCQQ |
| | | | | | | | AKDSDYSNLLWDYWGQ | SYTIPLTFGQGTKVE |
| | | | | | | | GTLVTVSS (SEQ ID | IK (SEQ ID NO: |
| | | | | | | | NO: 551) | 552) |
| 66. | YTFTGH | GIINPS | CARDGAWFG | RASQGI | SNLET | QQYYSF | QVQLVQSGAEVKKPGA | DIQMTQSPSSLSASV |
| | YMH | GGSTSY | EEYYYGMDV | SNWLA | (SEQ | PLYT | SVKVSCKASGYTFTGH | GDRVTITCRASQGIS |
| | (SEQ | A (SEQ | W (SEQ ID | (SEQ | ID | (SEQ | YMHWVRQAPGQGLEWM | NWLAWYQQKPGKAPK |
| | ID NO: | ID NO: | NO: 553) | ID NO: | NO: | ID NO: | GIINPSGGSTSYAQKF | LLIYDASNLETGVPS |
| | 244) | 69) | | 554) | 491) | 555) | QGRVTMTRDTSTSTVY | RFSGSGSGTDFTLTI |
| | | | | | | | MELSSLRSEDTAVYYC | SSLQPEDFATYYCQQ |
| | | | | | | | ARDGAWFGEEYYYGMD | YYSFPLYTFGQGTKV |
| | | | | | | | VWGQGTTVTVSS | EIK (SEQ ID NO: |
| | | | | | | | (SEQ ID NO: 556) | 557) |
| 67. | YTFTGY | GMIYPR | CAMTGWGYG | RASQGI | STLQS | QQSYSA | QVQLVQSGAEVKKPGA | DIQMTQSPSSLSASV |
| | YMH | DGSTSY | MDVW (SEQ | NNYLA | (SEQ | PPT | SVKVSCKASGYTFTGY | GDRVTITCRASQGIN |
| | (SEQ | A (SEQ | ID NO: | (SEQ | ID | (SEQ | YMHWVRQAPGQGLEWM | NYLAWYQQKPGKAPK |
| | ID NO: | ID NO: | 559) | ID NO: | NO: | ID NO: | GMIYPRDGSTSYAQKF | LLIYDASTLQSGVPS |
| | 128) | 558) | | 560) | 420) | 561) | QGRVTMTRDTSTSTVY | RFSGSGSGTDFTLTI |
| | | | | | | | MELSSLRSEDTAVYYC | SSLQPEDFATYYCQQ |
| | | | | | | | AMTGWGYGMDVWGKGT | SYSAPPTFGQGTKLE |
| | | | | | | | TVTVSS (SEQ ID | IK (SEQ ID NO: |
| | | | | | | | NO: 562) | 563) |
| 68. | FTFGDY | AWSYD | CAKDICSST | RASQNI | DASNL | CQQANS | EVQLLESGGGLVQPGG | DIQMTQSPSSLSASV |
| | AMS | GTNKYY | SCYFDLW | NNYVN | ET | FPPTF | SLRLSCAASGFTFGDY | GDRVTITCRASQNIN |
| | (SEQ | A (SEQ | (SEQ ID | (SEQ | (SEQ | (SEQ | AMSWVRQAPGKGLEWV | NYVNWYQQKPGKAPK |
| | ID NO: | ID NO: | NO: 336) | ID NO: | ID | ID NO: | AWSYDGTNKYYADSV | LLIYDASNLETGVPS |
| | 233) | 335) | | 337) | NO: | 338) | KGRFTISRDNSKNTLY | RFSGSGSGTDFTLTI |
| | | | | | 159) | | LQMNSLRAEDTAVYYC | SSLQPEDFATYYCQQ |
| | | | | | | | AKDICSSTSCYFDLWG | ANSFPPTFGQGTRLE |
| | | | | | | | RGTLVTVSS (SEQ | IK (SEQ ID NO: |
| | | | | | | | ID NO: 564) | 565) |
| 69. | YTFTSY | GIIDPS | CAREEWSSG | RASQGI | ATSSL | CQQTYS | QVQLVQSGAEVKKPGA | DIQMTQSPSSLSASV |
| | YMH | GGSTSY | GVGYFDYW | SSYLA | QT | IPITF | SVKVSCKASGYTFTSY | GDRVTITCRASQGIS |
| | (SEQ | A (SEQ | (SEQ ID | (SEQ | (SEQ | (SEQ | YMHWVRQAPGQGLEWM | SYLAWYQQKPGKAPK |
| | ID NO: | ID NO: | NO: 341) | ID NO: | ID | ID NO: | GIIDPSGGSTSYAQKF | LLIYATSSLQTGVPS |
| | 215) | 340) | | 342) | NO: | 344) | QGRVTMTRDTSTSTVY | RFSGSGSGTDFTLTI |
| | | | | | 343) | | MELSSLRSEDTAVYYC | SSLQPEDFATYYCQQ |
| | | | | | | | AREEWSSGGVGYFDYW | TYSIPITFGQGTRLE |
| | | | | | | | GQGTLVTVSS (SEQ | IK (SEQ ID NO: |
| | | | | | | | ID NO: 566) | 567) |
| 70. | YPFTDY | GWIKPN | CARDRFVGK | RASQSI | SSLQS | QQSYDT | QVQLVQSGAEVKKPGA | DIQMTQSPSSLSASV |
| | YMH | SGDTEY | PDYYYYGMD | SVWLA | (SEQ | PYT | SVKVSCKASGYPFTDY | GDRVTITCRASQSIS |
| | (SEQ | A (SEQ | VW (SEQ | (SEQ | ID | (SEQ | YMHWVRQAPGQGLEWM | VWLAWYQQKPGKAPK |
| | ID NO: | ID NO: | ID NO: | ID NO: | NO: | ID NO: | GWIKPNSGDTEYAQKF | LLIYAASSLQSGVPS |
| | 568) | 569) | 570) | 571) | 362) | 572) | QGRVTMTRDTSTSTVY | RFSGSGSGTDFTLTI |
| | | | | | | | MELSSLRSEDTAVYYC | SSLQPEDFATYYCQQ |
| | | | | | | | ARDRFVGKPDYYYYGM | SYDTPYTFGQGTKLE |
| | | | | | | | DVWGQGTMVTVSS | IK (SEQ ID NO: |
| | | | | | | | (SEQ ID NO: 573) | 574) |
| 71. | YTFTSY | GIINPS | CARDSVAGT | RASQGI | AASSL | CQQSYS | QVQLVQSGAEVKKPGA | DIQMTQSPSSLSASV |
| | YMH | GGSTSY | GGRYYGMDV | SNYFA | QG | LPYTF | SVKVSCKASGYTFTSY | GDRVTITCRASQGIS |
| | (SEQ | A (SEQ | W (SEQ ID | (SEQ | (SEQ | (SEQ | YMHWVRQAPGQGLEWM | NYFAWYQQKPGKAPK |
| | | | NO: 350) | | ID | | GIINPSGGSTSYAQKF | LLIYAASSLQGGVPS |
| | ID NO: | ID NO: | | ID NO: | NO: | ID NO: | QGRVTMTRDTSTSTVY | RFSGSGSGTDFTLTI |
| | 215) | 69) | | 351) | 352) | 353) | MELSSLRSEDTAVYYC | SSLQPEDFATYYCQQ |
| | | | | | | | ARDSVAGTGGRYYGMD | SYSLPYTFGQGTKLE |
| | | | | | | | VWGQGTLVTVSS | IK (SEQ ID NO: |
| | | | | | | | (SEQ ID NO: 575) | 576) |
| 72. | YTFTSY | GVINPI | CASGAPSYY | RASQSI | SYLAT | QQSYST | QVQLVQSGAEVKKPGA | DIQMTQSPSSLSASV |
| | YMH | GGTTTY | YYGMDVW | SSYLN | (SEQ | PLT | SVKVSCKASGYTFTSY | GDRVTITCRASQSIS |
| | (SEQ | A (SEQ | (SEQ ID | (SEQ | ID | (SEQ | YMHWVRQAPGQGLEWM | SYLNWYQQKPGKAPK |
| | ID NO: | ID NO: | NO: 578) | ID NO: | NO: | ID NO: | GVINPIGGTTTYAQKF | LLIYGTSYLATGVPS |
| | 215) | 577) | | 172) | 579) | 429) | QGRVTMTRDTSTSTVY | RFSGSGSGTDFTLTI |
| | | | | | | | MELSSLRSEDTAVYYC | SSLQPEDFATYYCQQ |
| | | | | | | | ASGAPSYYYYGMDVWG | SYSTPLTFGQGTKVE |
| | | | | | | | QGTLVTVSS (SEQ | IK (SEQ ID NO: |
| | | | | | | | ID NO: 580) | 581) |
| 73. | YTFTSN | GRINPH | CARAGQLWS | QASQDI | TALRT | QQSYSH | QVQLVQSGAEVKKPGA | DIQMTQSPSSLSASV |
| | YVH | SGDTSY | DWYFDLW | RNYLN | (SEQ | PLT | SVKVSCKASGYTFTSN | GDRVTITCQASQDIR |
| | (SEQ | A (SEQ | (SEQ ID | (SEQ | ID | (SEQ | YVHWVRQAPGQGLEWM | NYLNWYQQKPGKAPK |
| | ID NO: | ID NO: | NO: 584) | ID NO: | NO: | ID NO: | GRINPHSGDTSYAQKF | LLIYAATALRTGVPS |
| | 582) | 583) | | 280) | 585) | 586) | QGRVTMTRDTSTSTVY | RFSGSGSGTDFTLTI |
| | | | | | | | MELSSLRSEDTAVYYC | SSLQPEDFATYYCQQ |
| | | | | | | | ARAGQLWSDWYFDLWG | SYSHPLTFGQGTKVE |
| | | | | | | | RGTLVTVSS (SEQ | IK (SEQ ID NO: |
| | | | | | | | ID NO: 587) | 588) |
| 74. | YTFTGY | GIINPS | CTTADYYYY | RASQGI | AASSL | CQQYYS | QVQLVQSGAEVKKPGA | DIQMTQSPSSLSASV |
| | YMH | GGNTKY | MDVW (SEQ | SNYLA | QS | NADF | SVKVSCKASGYTFTGY | GDRVTITCRASQGIS |
| | (SEQ | A (SEQ | ID NO: | (SEQ | (SEQ | (SEQ | YMHWVRQAPGQGLEWM | NYLAWYQQKPGKAPK |
| | ID NO: | ID NO: | 356) | ID NO: | ID | ID NO: | GIINPSGGNTKYAQKF | LLIYAASSLQSGVPS |
| | 128) | 355) | | 218) | NO: | 357) | QGRVTMTRDTSTSTVY | RFSGSGSGTDFTLTI |
| | | | | | 65) | | MELSSLRSEDTAVYYC | SSLQPEDFATYYCQQ |
| | | | | | | | TTADYYYYMDVWGKGT | YYSNADFGQGTKVEI |
| | | | | | | | TVTVSS (SEQ ID | K (SEQ ID NO: |
| | | | | | | | NO: 589) | 590) |
| 75. | FTFSDF | SYISGD | CARDRPYYY | RASQSV | SSLQS | QQYKSY | EVQLLESGGGLVQPGG | DIQMTQSPSSLSASV |
| | WMH | SGYTNY | YMDVW | SRSLA | (SEQ | PVT | SLRLSCAASGFTFSDF | GDRVTITCRASQSVS |
| | (SEQ | A (SEQ | (SEQ ID | (SEQ | ID | (SEQ | WMHWVRQAPGKGLEWI | RSLAWYQQKPGKAPK |
| | ID NO: | ID NO: | NO: 360) | ID NO: | NO: | ID NO: | SYISGDSGYTNYADSV | LLIYAASSLQSGVPS |
| | 359) | 170) | | 361) | 362) | 363) | KGRFTISRDNSKNTLY | RFSGSGSGTDFTLTI |
| | | | | | | | LQMNSLRAEDTAVYYC | SSLQPEDFATYYCQQ |
| | | | | | | | ARDRPYYYYMDVWGKG | YKSYPVTFGQGTKVE |
| | | | | | | | TTVTVSS (SEQ ID | IK (SEQ ID NO: |
| | | | | | | | NO: 591) | 592) |
| 76. | FTFDDY | SDISGS | CAKDVWAG | QASQDI | SYLQS | QQAHNY | EVQLLESGGGLVQPGG | DIQMTQSPSSLSASV |
| | TMH | GGSTYY | TPLHFDYW | SNYLN | (SEQ | PIT | SLRLSCAASGFTFDDY | GDRVTITCQASQDIS |
| | (SEQ | A (SEQ | (SEQ ID | (SEQ | ID | (SEQ | TMHWVRQAPGKGLEWV | NYLNWYQQKPGKAPK |
| | ID NO: | ID NO: | NO: 367) | ID NO: | NO: | ID NO: | SDISGSGGSTYYADSV | LLIYAASYLQSGVPS |
| | 365) | 366) | | 138) | 368) | 369) | KGRFTISRDNSKNTLY | RFSGSGSGTDFTLTI |
| | | | | | | | LQMNSLRAEDTAVYYC | SSLQPEDFATYYCQQ |
| | | | | | | | AKDVWAGTPLHFDYW | AHNYPITFGQGTRLE |
| | | | | | | | GQGTLVTVSS (SEQ | IK (SEQ ID NO: |
| | | | | | | | ID NO: 593) | 594) |
| 77. | FTFSNA | ASISST | CAREWGAT | RASQSI | SSLQS | QQANAF | EVQLLESGGGLVQPGG | DIQMTQSPSSLSASV |
| | WMS | SAYIDY | TFDYW | STWLA | (SEQ | PPT | SLRLSCAASEFTFSNA | GDRVTITCRASQSIS |
| | (SEQ | A (SEQ | (SEQ ID | (SEQ | ID | (SEQ | WMSWVRQAPGKGLEWV | TWLAWYQQKPGKAPK |
| | ID NO: | ID NO: | NO: 372) | ID NO: | NO: | ID NO: | ASISSTSAYIDYADSV | LLIYAASSLQSGVPS |
| | 183) | 371) | | 373) | 362) | 374) | KGRFTISRDNSKNTLY | RFSGSGSGTDFTLTI |
| | | | | | | | LQMNSLRAEDTAVYYC | SSLQPEDFATYYCQQ |
| | | | | | | | AREWGATTFDYWGQG | ANAFPPTFGQGTRLE |
| | | | | | | | TLVTVSS (SEQ ID | IK (SEQ ID NO: |
| | | | | | | | NO: 595) | 596) |
| 78. | GTFSSY | GWMEPH | CAKGGFSWF | KSSQSV | STRES | QQYYST | QVQLVQSGAEVKKPGS | DIVMTQSPDSLAVSL |
| | AIS | TGNTRY | DPW (SEQ | LYSSNN | (SEQ | PPT | SVKVSCKASGGTFSSY | GERATINCKSSQSVL |
| | (SEQ | A (SEQ | ID NO: | KNYLA | ID | (SEQ | AISWVRQAPGQGLEWM | YSSNNKNYLAWYQQK |
| | ID NO: | ID NO: | 377) | (SEQ | NO: | ID NO: | GWMEPHTGNTRYAQKF | PGQPPKLLIYWASTR |
| | 77) | 376) | | ID NO: | 378) | 379) | QGRVTITADESTSTAY | ESGVPDRFSGSGSGT |
| | | | | 289) | | | MELSSLRSEDTAVYYC | DFTLTISSLQAEDVA |
| | | | | | | | AKGGFSWFDPWGQGTL | VYYCQQYYSTPPTFG |
| | | | | | | | VTVSS (SEQ ID | QGTRLEIK (SEQ |
| | | | | | | | NO: 597) | ID NO: 598) |
| 79. | FTFDDY | ASITSS | CARERVDWN | RASQGI | STRAT | QQYYTY | EVQLLESGGGLVKPGG | EIVMTQSPATLSVSP |
| | AMH | SAFIDY | SYFDLW | SNSYLA | (SEQ | PPT | SLRLSCAASGFTFDDY | GERATLSCRASQGIS |
| | (SEQ | A (SEQ | (SEQ ID | (SEQ | ID | (SEQ | AMHWVRQAPGKGLEWV | NSYLAWYQQKPGQAP |
| | ID NO: | ID NO: | NO: 382) | ID NO: | NO: | ID NO: | ASITSSSAFIDYAASV | RLLIYGASTRATGIP |
| | 135) | 381) | | 383) | 384) | 385) | KGRFTISRDDSKNTLY | ARFSGSGSGTEFTLT |
| | | | | | | | LQMNSLKTEDTAVYYC | ISSLQSEDFAVYYCQ |
| | | | | | | | ARERVDWNSYFDLWGR | QYYTYPPTFGPGTKV |
| | | | | | | | GTLVTVSS (SEQ ID | DIK (SEQ ID NO: |
| | | | | | | | NO: 599) | 600) |
| 80. | FTFDDY | SAISGS | CAKDLGVW | QASQDI | SNLEA | QQSYST | EVQLLESGGGLVQPGG | DIQMTQSPSSLSASV |
| | AMH | GGSTYY | PAALDYW | SNHLN | (SEQ | PLT | SLRLSCAASGFTFDDY | GDRVTITCQASQDIS |
| | (SEQ | A (SEQ | (SEQ ID | (SEQ | ID | (SEQ | AMHWVRQAPGKGLEWV | NHLNWYQQKPGKAPK |
| | ID NO: | ID NO: | NO: 601) | ID NO: | NO: | ID NO: | SAISGSGGSTYYADSV | LLIYDASNLEAGVPS |
| | 135) | 103) | | 602) | 603) | 429) | KGRFTISRDNSKNTLY | RFSGSGSGTDFTLTI |
| | | | | | | | LQMNSLRAEDTAVYYC | SSLQPEDFATYYCQQ |
| | | | | | | | AKDLGVWPAALDYWG | SYSTPLTFGGGTKVE |
| | | | | | | | QGTTVTVSS (SEQ | IK (SEQ ID NO: |
| | | | | | | | ID NO: 604) | 605) |
| 81. | FAFSSH | AGTSGS | CARETYYYY | RASQGI | ANLEG | QQSDIF | EVQLLESGGGLVKPGG | DIQMTQSPSSLSASV |
| | WMH | GESRDY | YMDVW | SNYLA | (SEQ | PPT | SLRLSCAASGFAFSSH | GDRVTITCRASQGIS |
| | (SEQ | A (SEQ | (SEQ ID | (SEQ | ID | (SEQ | WMHWVRQAPGKGLEWV | NYLAWYQQKPGKAPK |
| | ID NO: | ID NO: | NO: 389) | ID NO: | NO: | ID NO: | AGTSGSGESRDYADFV | LLIYDAANLEGGVPS |
| | 387) | 388) | | 218) | 390) | 391) | KGRFTISRDDSKNTLY | RFSGSGSGTDFTLTI |
| | | | | | | | LQMNSLKTEDTAVYYC | SSLQPEDFATYYCQQ |
| | | | | | | | ARETYYYYYMDVWGKG | SDIFPPTFGQGTKVE |
| | | | | | | | TTVTVSS (SEQ ID | IK (SEQ ID NO: |
| | | | | | | | NO: 606) | 607) |
| 82. | YTFTRH | GWINVK | CARESSGWY | RASQSI | SSLQS | QQSNSF | QVQLVQSGAEVKKPGA | DIQMTQSPSSLSASV |
| | WIH | TGGAGY | GTDVW | SNYLA | (SEQ | PLT | SVKVSCKASGYTFTRH | GDRATITCRASQSIS |
| | (SEQ | A (SEQ | (SEQ ID | (SEQ | ID | (SEQ | WIHWVRQAPGQGLEWM | NYLAWYQQKPGKAPK |
| | ID NO: | ID NO: | NO: 395) | ID NO: | NO: | ID NO: | GWINVKTGGAGYAQKF | LLIYAASSLQSGVPS |
| | 393) | 394) | | 396) | 362) | 397) | QGRVTMTRDTSTSTVY | RFSGSGSGTDFTLTI |
| | | | | | | | MELSSLRSEDTAVYYC | SSLQPEDFATYYCQQ |
| | | | | | | | ARESSGWYGTDVWGQG | SNSFPLTFGGGTKVE |
| | | | | | | | TTVTVSS (SEQ ID | IK (SEQ ID NO: |
| | | | | | | | NO: 608) | 609) |
| 83. | FTFSSY | AAISYD | CARENKQWL | QASQDI | NLRS | QQANSF | EVQLLESGGGLVQPGG | DIQMTQSPSSLSASV |
| | WMH | GKYKDY | ASFDYW | SNFVN | (SEQ | PVT | SLRLSCAASGFTFSSY | GDRVTITCQASQDIS |
| | (SEQ | E (SEQ | (SEQ ID | (SEQ | ID | (SEQ | WMHWVRQAPGKGLEWV | NFVNWYQQKPGKAPK |
| | ID NO: | ID NO: | NO: 400) | ID NO: | NO: | ID NO: | AAISYDGKYKDYEDSV | LLIYAANLRSGVPSR |
| | 83) | 399) | | 401) | 402) | 403) | KGRFTISRDNSKNTLY | FSGSGSGTDFTLTIS |
| | | | | | | | LQMNSLRAEDTAVYYC | SLQPEDFATYYCQQA |
| | | | | | | | ARENKQWLASFDYWGQ | NSFPVTFGPGTKVDI |
| | | | | | | | GTLVTVSS (SEQ ID | K (SEQ ID NO: |
| | | | | | | | NO: 610) | 611) |
| 84. | GTFSSS | GWISAY | CASRVHSGG | QASEHI | SSLQS | QQTDSI | QVQLVQSGAEVKKPGA | DIQMTQSPSSLSASV |
| | AIS | NGYTNY | SYPDDYW | YNYLN | (SEQ | PIT | SVKVSCKASGGTFSSS | GDRVTITCQASEHIY |
| | (SEQ | A (SEQ | (SEQ ID | (SEQ | ID | (SEQ | AISWVRQAPGQGLEWM | NYLNWYQQKPGKAPK |
| | ID NO: | ID NO: | NO: 614) | ID NO: | NO: | ID NO: | GWISAYNGYTNYAQKF | LLIYAASSLQSGVPS |
| | 612) | 613) | | 615) | 362) | 616) | QGRVTMTRDTSTSTVY | RFSGSGSGTDFTLTI |
| | | | | | | | MELSSLRSEDTAVYYC | SSLQPEDFATYYCQQ |
| | | | | | | | ASRVHSGGSYPDDYWG | TDSIPITFGQGTKVE |
| | | | | | | | QGTLVTVSS (SEQ | IK (SEQ ID NO: |
| | | | | | | | ID NO: 617) | 618) |

[0418] In some embodiments, the antibody comprises the CDRs of Clone ID: 6, Clone ID: 75, or Clone ID: 79 of MAdCAM Antibody Table 2.

[0419] The IgG and scFv formats illustrated herein are simply non-limiting examples. The CDRs provided herein can be placed in different formats, including different VH and VL/VK formats and still be able to bind to MAdCAM.

[0420] Although the CDRs are illustrated in the tables provided herein, there are other ways to annotate or identify CDRs. For example, in some embodiments, the HCDR2 can have an extra amino acid at the N-terminus. For example, for the HCDR2 of Clone 6 the table indicates that it has a sequence of: SRINSYGTSTTYA (SEQ ID NO: 91) However, in some embodiments, the HCDR2 has a sequence of VSRINSYGTSTTYA (SEQ ID NO: 793), which is shown with an extra residue, a valine, at the N-terminus of the HCDR2. The valine is clearly illustrated in VH peptide of the tables provided herein. Therefore, in some embodiments, the HCDR2 comprises one additional amino acid immediately to the N-terminus of the HCDR2 listed in the table. The residue would be the residue that is immediately to the N-terminus of the HCDR2 found in the VH sequence provided for in the table. One of skill in the art with this information could immediately envisage the HCDR2 peptide sequence that has the additional amino acid residue immediately to the N-terminus of the HCDR2 listed in the table.

[0421] Similarly, the HCDR3 can exclude the cysteine residue. Each of the HCDR3 polypeptides provided for in the table starts with a cysteine residue. In some embodiments, the HCDR3 does not include the cysteine and is still capable of binding to the target antigen when present with the other CDRs. Furthermore, in some embodiments, the HCDR3 does not have the last C-terminal residue illustrated in the tables provided for herein. Therefore, in some embodiments, the HCDR3 does not have the cysteine and/or the last C-terminal residue illustrated in the tables. One of skill in the art with this information could immediately envisage the HCDR3 peptide sequence that does not have the cysteine and/or the last C-terminal residue illustrated in the tables.

[0422] In some embodiments, the LCDR2 can have one or two extra amino acid residues at the N-terminus. These additional residues would be those that are immediately to the N-terminus of the LCDR2 present in the VL/VK chain provided for herein. For example, the LCDR2 of Clone 6 is provided as GASSLQS (SEQ ID NO: 87), but in some embodiments could be IYGASSLQS (SEQ ID NO: 794) or YGASSLQS (SEQ ID NO: 795). One of skill in the art with this information could immediately envisage the LCDR2 peptide sequence that has one or two extra amino acid residues at the N-terminus of the LCDR2 sequence provided for herein. These embodiments are sufficiently described and do not require application to list each of these different annotations and one of skill in the art with the guidance and description provided herein could write them out individually without any undue experimentation.

[0423] There are also alternative systems for annotating CDRs, all of which can be used. For example, CDRs can be chosen based on the Kabat systems, the IMGT system, or the CHOTHIA. Other proprietary systems can also be used, which may be based on the predicted 3-dimensional structure of the protein. Accordingly, in some embodiments, the CDRs of Clone ID: 6, Clone ID: 75, or Clone ID: 79 of MAdCAM Antibody Table 2 can also be characterized as shown in in the following table. These alternative CDRs can be substituted for these clone referenced in MAdCAM Antibody Table 2 or the equivalent clone numbering in MAdCAM Antibody Table 1, i.e, Clone 6, Clone 59, and Clone 63.

Alterative CDRs for Certain MAdCAM Ab Clones

| Clone | | | | | | | |
|---|---|---|---|---|---|---|---|
| No. | | | | | | | |
| (MAdC | | | | | | | |
| AM Ab | | | | | | | |
| Table | Annotation | | | | | | |
| 2) | System | LCDR1 | LCDR2 | LCDR3 | HCDR1 | HCDR2 | HCDR3 |
| 6 | Proprietary | RASQIIG | SSLQS | QQSYRLPFT | FTFNNYAFH | SRINSYGT | CAREGPVA |
| | | TNLA | (SEQ ID | (SEQ ID | (SEQ ID | STTYA | GYWYFDLW |
| | | (SEQ ID | NO: 362) | NO: 802) | NO: 90) | (SEQ ID | (SEQ ID |
| | | NO: 93) | | | | NO: 91) | NO: 92) |
| | Other | RASQIIG | GASSLQS | CQQSYRLPF | FTFNNYAFH | SRINSYGT | CAREGPVA |
| | Annotation | TNLA | (SEQ ID | TF | (SEQ ID | STTYA | GYWYFDLW |
| | | (SEQ ID | NO: 87) | (SEQ ID | NO: 90 | (SEQ ID | (SEQ ID |
| | | NO: 93) | | NO: 94) | | NO: 91) | NO: 92) |
| | Kabat | RASQIIG | GASSLQS | QQSYRLPFT | NYAFH | RINSYGTST | EGPVAGYW |
| | | TNLA | (SEQ ID | (SEQ ID | (SEQ ID | TYADSVKG | YFDL |
| | | (SEQ ID | NO: 87) | NO: 802) | NO: 803) | (SEQ ID | (SEQ ID |
| | | NO: 93) | | | | NO: 804) | NO: 805) |
| | IMGT | QIIGTN | GAS | QQSYRLPFT | GFTFNNYA | INSYGTST | AREGPVAG |
| | | (SEQ ID | | (SEQ ID | (SEQ ID | (SEQ ID | YWYFDL |
| | | NO: | | NO: 802) | NO: 807) | NO: 808) | (SEQ ID |
| | | 806) | | | | | NO: 809) |
| | CHOTHIA | RASQIIG | GASSLQS | QQSYRLPFT | GFTFNNY | NSYGTS | EGPVAGYW |
| | | TNLA | (SEQ ID | (SEQ ID | (SEQ ID | (SEQ ID | YFDL |
| | | (SEQ ID | NO: 87) | NO: 802) | NO: 810) | NO: 811) | (SEQ ID |
| | | NO: 93) | | | | | NO: 805) |
| 75 | Proprietary | RASQSVS | SSLQS | QQYKSYPVT | FTFSDFWMH | SYISGDSG | CARDRPYY |
| | | RSLA | (SEQ ID | (SEQ ID | (SEQ ID | YTNYA | YYMDVW |
| | | (SEQ ID | NO: 362) | NO: 363) | NO: 359) | (SEQ ID | (SEQ ID |
| | | NO: 361) | | | | NO: 170) | NO: 360) |
| | Other | RASQSVS | AASSLQS | CQQYKSYP | FTFSDFWMH | SYISGDSG | CARDRPYY |
| | Annotation | RSLA | (SEQ ID | VTF | (SEQ ID | YTNYA | YYMDVW |
| | | (SEQ ID | NO: 65) | (SEQ ID | NO: 359) | (SEQ ID | (SEQ ID |
| | | NO: 361) | | NO: 812) | | NO: 170) | NO: 360) |
| | Kabat | RASQSVS | AASSLQS | QQYKSYPVT | DFWMH | YISGDSGYT | DRPYYYYM |
| | | RSLA | (SEQ ID | (SEQ ID | (SEQ ID | NYADSVKG | DV |
| | | (SEQ ID | NO: 65) | NO: 363) | NO: 813) | (SEQ ID | (SEQ ID |
| | | NO: 361) | | | | NO: 814) | NO: 815) |
| | IMGT | QSVSRS | AAS | QQYKSYPVT | GFTFSDFW | ISGDSGYT | ARDRPYYY |
| | | (SEQ ID | | (SEQ ID | (SEQ ID | (SEQ ID | YMDV |
| | | NO: 816) | | NO: 363) | NO: 817) | NO: 818) | (SEQ ID |
| | | | | | | | NO: 819) |
| | CHOTHIA | RASQSVS | AASSLQS | QQYKSYPVT | GFTFSDF | SGDSGY | DRPYYYYM |
| | | RSLA | (SEQ ID | (SEQ ID | (SEQ ID | (SEQ ID | DV |
| | | (SEQ ID | NO: 65) | NO: 363) | NO: 820) | NO: 821) | (SEQ ID |
| | | NO: 361) | | | | | NO: 815) |
| 79 | Proprietary | RASQGIS | STRAT | QQYYTYPPT | FTFDDYAMH | ASITSSSA | CARERVDW |
| | | NSYLA | (SEQ ID | (SEQ ID | (SEQ ID | FIDYA | NSYFDLW |
| | | (SEQ ID | NO: 384) | NO: 385) | NO: 135) | (SEQ ID | (SEQ ID |
| | | NO: 383) | | | | NO: 381) | NO: 382) |
| | Other | RASQGIS | GASTRAT | CQQYYTYPP | FTFDDYAMH | ASITSSSA | CARERVDW |
| | Annotation | NSYLA | (SEQ ID | TF | (SEQ ID | FIDYA | NSYFDLW |
| | | (SEQ ID | NO: 241) | (SEQ ID | NO: 135) | (SEQ ID | (SEQ ID |
| | | NO: 383) | | NO: 822) | | NO: 381) | NO: 382) |
| | Kabat | RASQGIS | GASTRAT | QQYYTYPPT | DYAMH | SITSSSAFI | ERVDWNSY |
| | | NSYLA | (SEQ ID | (SEQ ID | (SEQ ID | DYAASVKG | FDL |
| | | (SEQ ID | NO: 241) | NO: 385) | NO: 823) | (SEQ ID | (SEQ ID |
| | | NO: 383) | | | | NO: 824) | NO: 825) |
| | IMGT | QGISNSY | GAS | QQYYTYPPT | GFTFDDYA | ITSSSAFI | ARERVDWN |
| | | (SEQ ID | | (SEQ ID | (SEQ ID | (SEQ ID | SYFDL |
| | | NO: 826) | | NO: 385) | NO: 827) | NO: 828) | (SEQ ID |
| | | | | | | | NO: 829) |
| | CHOTHIA | RASQGIS | GASTRAT | QQYYTYPPT | GFTFDDY | TSSSAF | ERVDWNSY |
| | | NSYLA | (SEQ ID | (SEQ ID | (SEQ ID | (SEQ ID | FDL |
| | | (SEQ ID | NO: 241) | NO: 385) | NO: 830) | NO: 831) | (SEQ ID |
| | | NO: 383) | | | | | NO: 825) |

[0424] In some embodiments, the antibody is linked to another antibody or therapeutic. In some embodiments, the MAdCAM antibody is linked to a PD-1 antibody or a IL-2 mutein as provided herein or that is incorporated by reference.

[0425] In some embodiments, the MAdCAM antibody comprises a sequence as shown in MAdCAM Antibody Table 1. In some embodiments, the antibody is in a scFV format as illustrated MAdCAM Antibody Table 1. In some embodiments, the antibody comprises a CDR1 from any one of clones 1-66 of MAdCAM Antibody Table 1, a CDR2 from any any one of clones 1-84, and a CDR3 from any one of clones 1-66 of MAdCAM Antibody Table 1. In some embodiments, the antibody comprises a LCDR1 from any one of clones 1-66 of MAdCAM Antibody Table 1, a LCDR2 from any any one of clones 1-66 of MAdCAM Antibody Table 1, and a LCDR3 from any one of clones 1-66 of MAdCAM Antibody Table 1. In some embodiments, the amino acid residues of the CDRs shown above contain mutations. In some embodiments, the CDRs contain 1, 2, 3, 4, 5, 6, 7, 8, 9, or 10 substitutions or mutations. In some embodiments, the substitution is a conservative substitution.

[0426] In some embodiments, the MAdCAM antibody has a VH region selected from any one of clones 1-84 of MAdCAM Antibody Table 2 and a VL region selected from any one of clones 1-84 as set forth in of MAdCAM Antibody Table 2. In some embodiments, the antibody comprises a CDR1 from any one of clones 1-84 of MAdCAM Antibody Table 2, a CDR2 from any any one of clones 1-84, and a CDR3 from any one of clones 1-84 of MAdCAM Antibody Table 2. In some embodiments, the antibody comprises a LCDR1 from any one of clones 1-84 of MAdCAM Antibody Table 2, a LCDR2 from any any one of clones 1-84 of MAdCAM Antibody Table 2, and a LCDR3 from any one of clones 1-84 of MAdCAM Antibody Table 2. In some embodiments, the amino acid residues of the CDRs shown above contain mutations. In some embodiments, the CDRs contain 1, 2, 3, 4, 5, 6, 7, 8, 9, or 10 substitutions or mutations. In some embodiments, the substitution is a conservative substitution.

[0427] In some embodiments, the molecule comprises an antibody that binds to MAdCAM. In some embodiments, the antibody comprises (i) a heavy chain variable region comprising heavy chain CDR1, CDR2, and CDR3 sequences, wherein the heavy chain CDR1 sequence has the amino acid sequence of any of the CDR1 sequences set forth in MAdCAM Antibody Table 1 or MAdCAM Antibody Table 2; the heavy chain CDR2 has the amino acid sequence of any of the CDR2 sequences set forth in MAdCAM Antibody Table 1 or MAdCAM Antibody Table 2, and the heavy chain CDR3 has the amino acid sequence of any of the CDR3 sequences set forth in MAdCAM Antibody Table 1 or MAdCAM Antibody Table 2, or variants of any of the foregoing; and (ii) a light chain variable region comprising light chain CDR1, CDR2, and CDR3 sequences, wherein the light chain CDR1 sequence has the amino acid sequence of any of the LCDR1 sequences set forth in MAdCAM Antibody Table 1 or MAdCAM Antibody Table 2; the light chain LCDR2 has the amino acid sequence of any of the LCDR2 sequences set forth in MAdCAM Antibody Table 1 or MAdCAM Antibody Table 2, and the light chain CDR3 has the the amino acid sequence of any of the LCDR3 sequences set forth in MAdCAM Antibody Table 1 or MAdCAM Antibody Table 2, or variants of any of the foregoing.

[0428] In some embodiments, the antibody comprises a heavy chain variable region comprising heavy chain CDR1, CDR2, and CDR3 sequences, wherein the heavy chain CDR1, CDR2, and CDR3 sequences have the amino acid sequence as set forth in Antibody 6 of Table 1 or Antibody 6 of Table 2, or variants of any of the foregoing; and (ii) a light chain variable region comprising light chain CDR1, CDR2, and CDR3 sequences, wherein the light chain CDR1, CDR2, and CDR3 sequences have the amino acid sequence as set forth sequence as set forth in Antibody 6 of Table 1 or Antibody 6 Table 2, or variants of any of the foregoing.

[0429] In some embodiments, the antibody comprises a heavy chain variable region comprising heavy chain CDR1, CDR2, and CDR3 sequences, wherein the heavy chain CDR1, CDR2, and CDR3 sequences have the amino acid sequence as set forth in Antibody 59 of Table 1 or Antibody 75 of Table 2, or variants of any of the foregoing; and (ii) a light chain variable region comprising light chain CDR1, CDR2, and CDR3 sequences, wherein the light chain CDR1, CDR2, and CDR3 sequences have the amino acid sequence as set forth sequence as set forth in Antibody 59 of Table 1 or Antibody 75 of Table 2, or variants of any of the foregoing.

[0430] In some embodiments, the antibody comprises a heavy chain variable region comprising heavy chain CDR1, CDR2, and CDR3 sequences, wherein the heavy chain CDR1, CDR2, and CDR3 sequences have the amino acid sequence as set forth in Antibody 63 of Table 1 or Antibody 79 of Table 2, or variants of any of the foregoing; and (ii) a light chain variable region comprising light chain CDR1, CDR2, and CDR3 sequences, wherein the light chain CDR1, CDR2, and CDR3 sequences have the amino acid sequence as set forth sequence as set forth in Antibody 63 of Table 1 or Antibody 79 of Table 2, or variants of any of the foregoing.

[0431] These are non-limiting illustrative examples and the antibodies can have the CDRs as set forth in the tables provided herein and are explicitly referenced without writing out the previous paragraphs for each CDR set.

[0432] In some embodiments, the MAdCAM antibody comprises a VH and VL(VK) chain as provided herein, such as those listed in the MAdCAM Antibody Table 2. In some embodiments, the VH peptide comprises a sequence of SEQ ID NO: 414, 591, or 599. In some embodiments, the VK chain comprises a sequence of 415, 592, or 600. In some embodiments, the antibody comprises a VH of SEQ ID NO: 414 and a VK of SEQ ID NO: 415. In some embodiments, the antibody comprises a VH of SEQ ID NO: 591 and a VK of SEQ ID NO: 592. In some embodiments, the antibody comprises a VH of SEQ ID NO: 599 and a VK of SEQ ID NO: 600. The VH and VK can also be in a scFV format as illustrated in the MAdCAM Antibody Table 1.

[0433] In some embodiments, a therapeutic is provided comprising one or more of the following polypeptides:

| SEQ | |
|---|---|
| ID NO: | Sequence |
| 796 | EVQLLESGGGLVQPGGSLRLSCAASGFTFNNYAFHWVRQAPGKGLEWVSRINSYGTSTTYADSVKGRF |
| | TISRDNSKNTLYLQMNSLRAEDTAVYYCAREGPVAGYWYFDLWGQGTLVTVSSASTKGPSVFPLAPSS |
| | KSTSGGTAALGCLVKDYFPEPVTVSWNSGALTSGVHTFPAVLQSSGLYSLSSVVTVPSSSLGTQTYIC |
| | NVNHKPSNTKVDKKVEPKSCDKTHTCPPCPAPEAAGAPSVFLFPPKPKDTLMISRTPEVTCVVVDVSH |
| | EDPEVKFNWYVDGVEVHNAKTKPREEQYNSTYRVVSVLTVLHQDWLNGKEYKCKVSNKALPAPIEKTI |
| | SKAKGQPREPQVYTLPPSREEMTKNQVSLTCLVKGFYPSDIAVEWESNGQPENNYKTTPPVLDSDGSF |
| | FLYSKLTVDKSRWQQGNVFSCSVMHEALHNHYTQKSLSLSPGGGGGSAPTSSSTKKTQLQLEHLLLDL |
| | QMILNGINNYKNPKLTRMLTFKFYMPKKATELKHLQCLEEELKPLEEALNLAPSKNFHLRPRDLISDI |
| | NVIVLELKGSETTFMCEYADETATIVEFINRWITFSQSIISTLT |
| 797 | DIQMTQSPSSLSASVGDRVTITCRASQIIGTNLAWYQQKPGKAPKLLIYGASSLQSGVPSRFSGSGSG |
| | TDFTLTISSLQPEDFATYYCQQSYRLPFTFGQGTKVEIKRRTVAAPSVFIFPPSDEQLKSGTASVVCL |
| | LNNFYPREAKVQWKVDNALQSGNSQESVTEQDSKDSTYSLSSTLTLSKADYEKHKVYACEVTHQGLSS |
| | PVTKSFNRGEC |
| 798 | EVQLLESGGGLVQPGGSLRLSCAASGFTFSDFWMHWVRQAPGKGLEWISYISGDSGYTNYADSVKGRF |
| | TISRDNSKNTLYLQMNSLRAEDTAVYYCARDRPYYYYMDVWGKGTTVTVSSASTKGPSVFPLAPSSKS |
| | TSGGTAALGCLVKDYFPEPVTVSWNSGALTSGVHTFPAVLQSSGLYSLSSVVTVPSSSLGTQTYICNV |
| | NHKPSNTKVDKKVEPKSCDKTHTCPPCPAPEAAGAPSVFLFPPKPKDTLMISRTPEVTCVVVDVSHED |
| | PEVKFNWYVDGVEVHNAKTKPREEQYNSTYRVVSVLTVLHQDWLNGKEYKCKVSNKALPAPIEKTISK |
| | AKGQPREPQVYTLPPSREEMTKNQVSLTCLVKGFYPSDIAVEWESNGQPENNYKTTPPVLDSDGSFFL |
| | YSKLTVDKSRWQQGNVFSCSVMHEALHNHYTQKSLSLSPGGGGGSAPTSSSTKKTQLQLEHLLLDLQM |
| | ILNGINNYKNPKLTRMLTFKFYMPKKATELKHLQCLEEELKPLEEALNLAPSKNFHLRPRDLISDINV |
| | IVLELKGSETTFMCEYADETATIVEFINRWITFSQSIISTLT |
| 799 | DIQMTQSPSSLSASVGDRVTITCRASQSVSRSLAWYQQKPGKAPKLLIYAASSLQSGVPSRFSGSGSG |
| | TDFTLTISSLQPEDFATYYCQQYKSYPVTFGQGTKVEIKRTVAAPSVFIFPPSDEQLKSGTASVVCLL |
| | NNFYPREAKVQWKVDNALQSGNSQESVTEQDSKDSTYSLSSTLTLSKADYEKHKVYACEVTHQGLSSP |
| | VTKSFNRGEC |
| 800 | EVQLLESGGGLVKPGGSLRLSCAASGFTFDDYAMHWVRQAPGKGLEWVASITSSSAFIDYAASVKGRF |
| | TISRDDSKNTLYLQMNSLKTEDTAVYYCARERVDWNSYFDLWGRGTLVTVSSASTKGPSVFPLAPSSK |
| | STSGGTAALGCLVKDYFPEPVTVSWNSGALTSGVHTFPAVLQSSGLYSLSSVVTVPSSSLGTQTYICN |
| | VNHKPSNTKVDKKVEPKSCDKTHTCPPCPAPEAAGAPSVFLFPPKPKDTLMISRTPEVTCVVVDVSHE |
| | DPEVKFNWYVDGVEVHNAKTKPREEQYNSTYRVVSVLTVLHQDWLNGKEYKCKVSNKALPAPIEKTIS |
| | KAKGQPREPQVYTLPPSREEMTKNQVSLTCLVKGFYPSDIAVEWESNGQPENNYKTTPPVLDSDGSFF |
| | LYSKLTVDKSRWQQGNVFSCSVMHEALHNHYTQKSLSLSPGGGGGSAPTSSSTKKTQLQLEHLLLDLQ |
| | MILNGINNYKNPKLTRMLTEKEYMPKKATELKHLQCLEEELKPLEEALNLAPSKNFHLRPRDLISDIN |
| | VIVLELKGSETTFMCEYADETATIVEFINRWITFSQSIISTLT |
| 801 | EIVMTQSPATLSVSPGERATLSCRASQGISNSYLAWYQQKPGQAPRLLIYGASTRATGIPARFSGSGS |
| | GTEFTLTISSLQSEDFAVYYCQQYYTYPPTFGPGTKVDIKRTVAAPSVFIFPPSDEQLKSGTASVVCL |
| | LNNFYPREAKVQWKVDNALQSGNSQESVTEQDSKDSTYSLSSTLTLSKADYEKHKVYACEVTHQGLSS |
| | PVTKSFNRGEC |

[0434] In some embodiments, the polypeptide comprises one peptide of SEQ ID NO: 796, 798, or 800 and a second peptide of SEQ ID NO: 797, 799, or 801. In some embodiments, a polypeptide is provided comprising a first peptide of SEQ ID NO: 796 and a second peptide comprising a sequence of SEQ ID NO: 797. In some embodiments, a polypeptide is provided comprising a first peptide of SEQ ID NO: 796 and a second peptide comprising a sequence of SEQ ID NO: 799. In some embodiments, a polypeptide is provided comprising a first peptide of SEQ ID NO: 796 and a second peptide comprising a sequence of SEQ ID NO: 625. In some embodiments, a polypeptide is provided comprising a first peptide of SEQ ID NO: 798 and a second peptide comprising a sequence of SEQ ID NO: 797. In some embodiments, a polypeptide is provided comprising a first peptide of SEQ ID NO: 798 and a second peptide comprising a sequence of SEQ ID NO: 799. In some embodiments, a polypeptide is provided comprising a first peptide of SEQ ID NO: 798 and a second peptide comprising a sequence of SEQ ID NO: 801. In some embodiments, a polypeptide is provided comprising a first peptide of SEQ ID NO: 800 and a second peptide comprising a sequence of SEQ ID NO: 797. In some embodiments, a polypeptide is provided comprising a first peptide of SEQ ID NO: 800 and a second peptide comprising a sequence of SEQ ID NO: 799. In some embodiments, a polypeptide is provided comprising a first peptide of SEQ ID NO: 800 and a second peptide comprising a sequence of SEQ ID NO: 801.

[0435] In some embodiments, the polypeptide is referred to as an antibody or antigen binding protein.

[0436] In some embodiments, as provided for herein, the MAdCAM antibody, or binding fragment thereof, is linked directly or indirectly to a PD-1 antibody or binding fragment thereof.

[0437] In some embodiments, the PD-1 antibody is selected from the following table:

TABLE 4
PD-1 Antibody

| Clone | | | | | | | | |
|---|---|---|---|---|---|---|---|---|
| (scFv) | VH Seq | VK Seq | CDR1 | CDR2 | CDR3 | LCDR1 | LCDR2 | LCDR3 |
| PD1AB1 | QVQLVQSGAE | DIQMTQS | GSFTGYY | GWINPN | CARDT | QASHDID | SSLQS | QQANSLPL |
| | VKKPGASVKV | PSSLSAS | MH (SEQ | DGAIHY | VTGDF | KYLN | (SEQ | T (SEQ |
| | SCKASGGSFT | VGDRVTI | ID NO: | A (SEQ | DYW | (SEQ ID | ID | ID NO: |
| | GYYMHWVRQA | TCQASHD | 621) | ID NO: | (SEQ | NO: | NO: | 625) |
| | PGQGLEWMGW | IDKYLNW | | 622) | ID | 624) | 362) | |
| | INPNDGAIHY | YQQKPGK | | | NO: | | | |
| | AQNFQGRVTM | APKLLIY | | | 623) | | | |
| | TRDTSTSTVY | AASSLQS | | | | | | |
| | MELSSLRSED | GVPSRFS | | | | | | |
| | TAVYYCARDT | GSGSGTD | | | | | | |
| | VTGDFDYWGQ | FTLTISS | | | | | | |
| | GTLVTVSS | LQPEDFA | | | | | | |
| | (SEQ ID | TYYCQQA | | | | | | |
| | NO: 619) | NSLPLTF | | | | | | |
| | | GGGTKVE | | | | | | |
| | | IK (SEQ | | | | | | |
| | | ID NO: | | | | | | |
| | | 620) | | | | | | |
| PD1AB2 | QVQLVQSGAE | DIQMTQS | GTFSRYA | GWINPN | CAKQG | RASQSIS | STLES | QQSYSTPF |
| | VKKPGASVKV | PSSLSAS | VS (SEQ | SGGTSY | DYGGG | SWLA | (SEQ | T (SEQ |
| | SCKASGGTFS | VGDRVTI | ID NO: | A (SEQ | YYFDY | (SEQ ID | ID | ID NO: |
| | RYAVSWVRQA | TCRASQS | 628) | ID NO: | W | NO: | NO: | 632) |
| | PGQGLEWMGW | ISSWLAW | | 629) | (SEQ | 196) | 631) | |
| | INPNSGGTSY | YQQKPGK | | | ID | | | |
| | AQRFQGRVTM | APKLLIY | | | NO: | | | |
| | TRDTSTSTVY | KTSTLES | | | 630) | | | |
| | MELSSLRSED | GVPSRFS | | | | | | |
| | TAVYYCAKQG | GSGSGTD | | | | | | |
| | DYGGGYYFDY | FTLTISS | | | | | | |
| | WGQGTLVTVS | LQPEDFA | | | | | | |
| | S (SEQ ID | TYYCQQS | | | | | | |
| | NO: 626) | YSTPFTF | | | | | | |
| | | GQGTKVE | | | | | | |
| | | IK (SEQ | | | | | | |
| | | ID NO: | | | | | | |
| | | 627) | | | | | | |
| PD1AB3 | QVQLVQSGAE | DIQMTQS | GTFSSYA | GWMNPN | CARVG | RASQSIN | SSLQS | QQSYSTPF |
| | VKKPGASVKV | PSSLSAS | IS (SEQ | SGNTGY | YSYGY | NWLA | (SEQ | T (SEQ |
| | SCKASGGTFS | VGDRVTI | ID NO: | A (SEQ | GMDVW | (SEQ ID | ID | ID NO: |
| | SYAISWVRQA | TCRASQS | 77) | ID NO: | (SEQ | NO: | NO: | 632) |
| | PGQGLEWMGW | INNWLAW | | 205) | ID | 636) | 362) | |
| | MNPNSGNTGY | YQQKPGK | | | NO: | | | |
| | AQKFQGRVTM | APKLLIY | | | 635) | | | |
| | TRDTSTSTVY | AASSLQS | | | | | | |
| | MELSSLRSED | GVPSRFS | | | | | | |
| | TAVYYCARVG | GSGSGTD | | | | | | |
| | YSYGYGMDVW | FTLTISS | | | | | | |
| | GQGTTVTVSS | LQPEDFA | | | | | | |
| | (SEQ ID | TYYCQQS | | | | | | |
| | NO: 633) | YSTPFTF | | | | | | |
| | | GPGTKVD | | | | | | |
| | | IK (SEQ | | | | | | |
| | | ID NO: | | | | | | |
| | | 634) | | | | | | |
| PD1AB4 | QVQLVQSGAE | DIQMTQS | YSFTTYY | GIINPS | CASGW | QASRDIK | SSLQS | QQSYSTPP |
| | VKKPGASVKV | PSSLSAS | MH (SEQ | GGSTSY | VYW | NYLA | (SEQ | T (SEQ |
| | SCKASGYSFT | VGDRVTI | ID NO: | A (SEQ | (SEQ | (SEQ ID | ID | ID NO: |
| | TYYMHWVRQA | TCQASRD | 639) | ID NO: | ID | NO: | NO: | 642) |
| | PGQGLEWMGI | IKNYLAW | | 69) | NO: | 641) | 362) | |
| | INPSGGSTSY | YQQKPGK | | | 640) | | | |
| | AQKFQGRVTM | APKLLIY | | | | | | |
| | TRDTSTSTVY | AASSLQS | | | | | | |
| | MELSSLRSED | GVPSRFS | | | | | | |
| | TAVYYCASGW | GSGSGTD | | | | | | |
| | VYWGQGTLVT | FTLTISS | | | | | | |
| | VSS (SEQ | LQPEDFA | | | | | | |
| | ID NO: | TYYCQQS | | | | | | |
| | 637) | YSTPPTF | | | | | | |
| | | GPGTKVD | | | | | | |
| | | IK (SEQ | | | | | | |
| | | ID NO: | | | | | | |
| | | 638) | | | | | | |
| PD1AB5 | EVQLLESGGG | DIQMTQS | FTFSSYA | AAIWSD | CARGL | RASQSIS | STLQS | QQSYSTPL |
| | LVQPGGSLRL | PSSLSAS | MS (SEQ | GSHQYY | GVERG | SWLA | (SEQ | T (SEQ |
| | SCAASGFTFS | VGDRVTI | ID NO: | A (SEQ | LDYW | (SEQ ID | ID | ID NO: |
| | SYAMSWVRQA | TCRASQS | 473) | ID NO: | (SEQ | NO: | NO: | 429) |
| | PGKGLEWVAA | ISSWLAW | | 645) | ID | 196) | 420) | |
| | IWSDGSHQYY | YQQKPGK | | | NO: | | | |
| | ADSVKGRFTI | APKLLIY | | | 646) | | | |
| | SRDNSKNTLY | AASTLQS | | | | | | |
| | LQMNSLRAED | GVPSRFS | | | | | | |
| | TAVYYCARGL | GSGSGTD | | | | | | |
| | GVERGLDYWG | FTLTISS | | | | | | |
| | QGTLVTVSS | LQPEDFA | | | | | | |
| | (SEQ ID | TYYCQQS | | | | | | |
| | NO: 643) | YSTPLTF | | | | | | |
| | | GQGTKVE | | | | | | |
| | | IK (SEQ | | | | | | |
| | | ID NO: | | | | | | |
| | | 644) | | | | | | |
| PD1AB6 | EVQLLESGGG | DIQMTQS | FTFSNYP | ALISDD | CARDS | RASQSIN | SNLET | QQSYSTPL |
| | LVQPGGSLRL | PSSLSAS | MH (SEQ | GTNEHY | KFANY | NYLS | (SEQ | T (SEQ |
| | SCAASGFTFS | VGDRVTI | ID NO: | A (SEQ | YYYYD | (SEQ ID | ID | ID NO: |
| | NYPMHWVRQA | TCRASQS | 649) | ID NO: | MDVW | NO: | NO: | 429) |
| | PGKGLEWVAL | INNYLSW | | 650) | (SEQ | 652) | 491) | |
| | ISDDGTNEHY | YQQKPGK | | | ID | | | |
| | ADSVKGRFTI | APKLLIY | | | NO: | | | |
| | SRDNSKNTLY | DASNLET | | | 651) | | | |
| | LQMNSLRAED | GVPSRFS | | | | | | |
| | TAVYYCARDS | GSGSGTD | | | | | | |
| | KFANYYYYYD | FTLTISS | | | | | | |
| | MDVWGQGTTV | LQPEDFA | | | | | | |
| | TVSS (SEQ | TYYCQQS | | | | | | |
| | ID NO: | YSTPLTF | | | | | | |
| | 647) | GPGTKVD | | | | | | |
| | | IK (SEQ | | | | | | |
| | | ID NO: | | | | | | |
| | | 648) | | | | | | |
| PD1AB7 | QVQLVQSGAE | DIVMTQS | YSFTGHY | GIINPN | CARGK | RSSQSIL | STRQS | QQYYSIPV |
| | VKKPGASVKV | PDSLAVS | IH (SEQ | GGSTTY | FDFYG | YSSNNRD | (SEQ | T (SEQ |
| | SCKASGYSFT | LGERATI | ID NO: | A (SEQ | DYVTA | YLA | ID | ID NO: |
| | GHYIHWVRQA | NCRSSQS | 655) | ID NO: | FDIW | (SEQ ID | NO: | 660) |
| | PGQGLEWMGI | ILYSSNN | | 656) | (SEQ | NO: | 659) | |
| | INPNGGSTTY | RDYLAWY | | | ID | 658) | | |
| | AQKLQGRVTM | QQKPGQP | | | NO: | | | |
| | TRDTSTSTVY | PKLLIYW | | | 657) | | | |
| | MELSSLRSED | ASTRQSG | | | | | | |
| | TAVYYCARGK | VPDRFSG | | | | | | |
| | FDFYGDYVTA | SGSGTDF | | | | | | |
| | FDIWGQGTMV | TLTISSL | | | | | | |
| | TVSS (SEQ | QAEDVAV | | | | | | |
| | ID NO: | YYCQQYY | | | | | | |
| | 653) | SIPVTFG | | | | | | |
| | | GGTKVEI | | | | | | |
| | | K (SEQ | | | | | | |
| | | ID NO: | | | | | | |
| | | 654) | | | | | | |
| PD1AB8 | QVQLVQSGAE | DIQMTQS | YTFSNYD | GWMNPN | CARGA | RASQSIN | SSLQG | QQSYSFPY |
| | VKKPGASVKV | PSSLSAS | MN (SEQ | SGHTGS | FGLHL | NWLA | (SEQ | T (SEQ |
| | SCKASGYTFS | VGDRVTI | ID NO: | A (SEQ | GELSL | (SEQ ID | ID | ID NO: |
| | NYDMNWVRQA | TCRASQS | 663) | ID NO: | HYYGM | NO: | NO: | 667) |
| | PGQGLEWMGW | INNWLAW | | 664) | DVW | 636) | 666) | |
| | MNPNSGHTGS | YQQKPGK | | | (SEQ | | | |
| | APKFQGRVTM | APKLLIY | | | ID | | | |
| | TRDTSTSTVY | AASSLQG | | | NO: | | | |
| | MELSSLRSED | GVPSRFS | | | 665) | | | |
| | TAVYYCARGA | GSGSGTD | | | | | | |
| | FGLHLGELSL | FTLTISS | | | | | | |
| | HYYGMDVWGQ | LQPEDFA | | | | | | |
| | GTTVTVSS | TYYCQQS | | | | | | |
| | (SEQ ID | YSFPYTF | | | | | | |
| | NO: 661) | GQGTKLE | | | | | | |
| | | (IK SEQ | | | | | | |
| | | ID NO: | | | | | | |
| | | 662) | | | | | | |
| PD1AB9 | QVQLVQSGAE | DIQMTQS | YTFTGYY | GKIVPM | CARGP | RASQSIS | SSLQS | QQANSFPV |
| | VKKPGSSVKV | PSSLSAS | MH (SEQ | FDAANY | KWELD | RWLA | (SEQ | T (SEQ |
| | SCKASGYTFT | VGDRVTI | ID NO: | A (SEQ | TW | (SEQ ID | ID | ID NO: |
| | GYYMHWVRQA | TCRASQS | 128) | ID NO: | (SEQ | NO: | NO: | 403) |
| | PGQGLEWMGK | ISRWLAW | | 670) | ID | 283) | 362) | |
| | IVPMFDAANY | YQQKPGK | | | NO: | | | |
| | APKFQGRVTI | APKLLIY | | | 671) | | | |
| | TADESTSTAY | GASSLQS | | | | | | |
| | MELSSLRSED | GVPSRFS | | | | | | |
| | TAVYYCARGP | GSGSGTD | | | | | | |
| | KWELDTWGQG | FTLTISS | | | | | | |
| | TLVTVSS | LQPEDFA | | | | | | |
| | (SEQ ID | TYYCQQA | | | | | | |
| | NO: 668) | NSFPVTF | | | | | | |
| | | GGGTKVE | | | | | | |
| | | IK (SEQ | | | | | | |
| | | ID NO: | | | | | | |
| | | 669) | | | | | | |
| PD1AB10 | QVQLVQSGAE | DIQMTQS | YTFTGYY | GIINPS | CAKTA | RASQSIN | SSLQS | QQGYSVPL |
| | VKKPGASVKV | PSSLSAS | MH (SEQ | GGSTSY | GYDWL | SWLA | (SEQ | S (SEQ |
| | SCKASGYTFT | VGDRVTI | ID NO: | A (SEQ | PSGLG | (SEQ ID | ID | ID NO: |
| | GYYMHWVRQA | TCRASQS | 128) | ID NO: | MDVW | NO: | NO: | 676) |
| | PGQGLEWMGI | INSWLAW | | 69) | (SEQ | 675) | 362) | |
| | INPSGGSTSY | YQQKPGK | | | ID | | | |
| | AQKFQGRVTM | APKLLIY | | | NO: | | | |
| | TRDTSTSTVY | YASSLQS | | | 674) | | | |
| | MELSSLRSED | GVPSRFS | | | | | | |
| | TAVYYCAKTA | GSGSGTD | | | | | | |
| | GYDWLPSGLG | FTLTISS | | | | | | |
| | MDVWGQGTTV | LQPEDFA | | | | | | |
| | TVSS (SEQ | TYYCQQG | | | | | | |
| | ID NO: | YSVPLSF | | | | | | |
| | 672) | GQGTKLE | | | | | | |
| | | IK (SEQ | | | | | | |
| | | ID NO: | | | | | | |
| | | 673) | | | | | | |
| PD1AB11 | QVQLVQSGAE | DIQMTQS | YTFSNYG | GGIIPI | CARWR | RASQGIS | SNLET | QQSYSTPL |
| | VKKPGSSVKV | PSSLSAS | IT (SEQ | FGSTAS | SDAFD | NWLA | (SEQ | T (SEQ |
| | SCKASGYTFS | VGDRVTI | ID NO: | YA | IW | (SEQ ID | ID | ID NO: |
| | NYGITWVRQA | TCRASQG | 679) | (SEQ | (SEQ | NO: | NO: | 429) |
| | PGQGLEWMGG | ISNWLAW | | ID NO: | ID | 554) | 491) | |
| | IIPIFGSTAS | YQQKPGK | | 680) | NO: | | | |
| | YAQKFQGRVT | APKLLIY | | | 681) | | | |
| | ITADESTSTA | DASNLET | | | | | | |
| | YMELSSLRSE | GVPSRFS | | | | | | |
| | DTAVYYCARW | GSGSGTD | | | | | | |
| | RSDAFDIWGQ | FTLTISS | | | | | | |
| | GTMVTVSS | LQPEDFA | | | | | | |
| | (SEQ ID | TYYCQQS | | | | | | |
| | NO: 677) | YSTPLTF | | | | | | |
| | | GGGTKVE | | | | | | |
| | | IK (SEQ | | | | | | |
| | | ID NO: | | | | | | |
| | | 678) | | | | | | |
| PD1AB12 | QVQLVQSGAE | DIQMTQS | GTFSTYA | GWINPN | CARVN | RASQGIR | STLNS | QQSYSTPF |
| | VKKPGASVKV | PSSLSAS | IS (SEQ | SGGTNY | YDFYY | NDLG | (SEQ | T (SEQ |
| | SCKASGGTFS | VGDRVTI | ID NO: | A (SEQ | GMDVW | (SEQ ID | ID | ID NO: |
| | TYAISWVRQA | TCRASQG | 684) | ID NO: | (SEQ | NO: | NO: | 632) |
| | PGQGLEWMGW | IRNDLGW | | 304) | ID | 686) | 687) | |
| | INPNSGGTNY | YQQKPGK | | | NO: | | | |
| | AQKFQGRVTM | APKLLIY | | | 685) | | | |
| | TRDTSTSIVY | RASTLNS | | | | | | |
| | MELSSLRSED | GVPSRFS | | | | | | |
| | TAVYYCARVN | GSGSGTD | | | | | | |
| | YDFYYGMDVW | FTLTISS | | | | | | |
| | GQGTTVTVSS | LQPEDFA | | | | | | |
| | (SEQ ID | TYYCQQS | | | | | | |
| | NO: 682) | YSTPFTF | | | | | | |
| | | GPGTKVD | | | | | | |
| | | IK (SEQ | | | | | | |
| | | ID NO: | | | | | | |
| | | 683) | | | | | | |
| PD1AB13 | QVQLVQSGAE | DIQMTQS | GTFSTYA | GWINPN | CARVN | RASQGIR | STLNS | QQSYSTPF |
| | VKKPGASVKV | PSSLSAS | IS (SEQ | SGGTNY | YDFYY | NDLG | (SEQ | T (SEQ |
| | SCKASGGTFS | VGDRVTI | ID NO: | A (SEQ | GMDVW | (SEQ ID | ID | ID NO: |
| | TYAISWVRQA | TCRASQG | 684) | ID NO: | (SEQ | NO: | NO: | 632) |
| | PGQGLEWMGW | IRNDLGW | | 304) | ID | 686) | 687) | |
| | INPNSGGTNY | YQQKPGK | | | NO: | | | |
| | AQKFQGRVTM | APKLLIY | | | 685) | | | |
| | TRDTSTSTVY | RASTLNS | | | | | | |
| | MELSSLRSED | GVPSRFS | | | | | | |
| | TAVYYCARVN | GSGSGTD | | | | | | |
| | YDFYYGMDVW | FTLTISS | | | | | | |
| | GQGTTVTVSS | LQPEDFA | | | | | | |
| | (SEQ ID | TYYCQQS | | | | | | |
| | NO: 688) | YSTPFTF | | | | | | |
| | | GPGTKVD | | | | | | |
| | | IK (SEQ | | | | | | |
| | | ID NO: | | | | | | |
| | | 683) | | | | | | |
| PD1AB14 | EVQLLESGGG | DIQMTQS | FSFSSYD | SGISGS | CASPY | RASQDIA | SSVQT | QQSYTTPY |
| | LVQPGGSLRL | PSSLSAS | MS (SEQ | GSSTYY | GMGYM | NYLA | (SEQ | T (SEQ |
| | SCAASGFSFS | VGDRVTI | ID NO: | A (SEQ | DVW | (SEQ ID | ID | ID NO: |
| | SYDMSWVRQA | TCRASQD | 691) | ID NO: | (SEQ | NO: | NO: | 696) |
| | PGKGLEWVSG | IANYLAW | | 692) | ID | 694) | 695) | |
| | ISGSGSSTYY | YQQKPGK | | | NO: | | | |
| | ADSVKGRFTI | APKLLIY | | | 693) | | | |
| | SRDNSKNTLY | GASSVQT | | | | | | |
| | LQMNSLRAED | GVPSRFS | | | | | | |
| | TAVYYCASPY | GSGSGTD | | | | | | |
| | GMGYMDVWGK | FTLTISS | | | | | | |
| | GTTVTVSS | LQPEDFA | | | | | | |
| | (SEQ ID | TYYCQQS | | | | | | |
| | NO: 689) | YTTPYTF | | | | | | |
| | | GQGTRLE | | | | | | |
| | | IK (SEQ | | | | | | |
| | | ID NO: | | | | | | |
| | | 690) | | | | | | |
| PD1AB15 | QVQLVQSGAE | DIQMTQS | GSFNNYA | GWINPN | CARVS | QASQDIS | SNLQS | QQSYSTPF |
| | VKKPGASVKV | PSSLSAS | IS (SEQ | TGGTSY | YGVGY | RYLN | (SEQ | T (SEQ |
| | SCKASGGSFN | VGDRVTI | ID NO: | A (SEQ | YMDVW | (SEQ ID | ID | ID NO: |
| | NYAISWVRQA | TCQASQD | 699) | ID NO: | (SEQ | NO: | NO: | 632) |
| | PGQGLEWMGW | ISRYLNW | | 700) | ID | 702) | 467) | |
| | INPNTGGTSY | YQQKPGK | | | NO: | | | |
| | AQKFQGRVTM | APKLLIY | | | 701) | | | |
| | TRDTSTSTVY | AASNLQS | | | | | | |
| | MELSSLRSED | GVPSRFS | | | | | | |
| | TAVYYCARVS | GSGSGTD | | | | | | |
| | YGVGYYMDVW | FTLTISS | | | | | | |
| | GKGTTVTVSS | LQPEDFA | | | | | | |
| | (SEQ ID | TYYCQQS | | | | | | |
| | NO: 697) | YSTPFTF | | | | | | |
| | | GPGTKVD | | | | | | |
| | | IK (SEQ | | | | | | |
| | | ID NO: | | | | | | |
| | | 698) | | | | | | |
| PD1AB16 | QVQLVQSGAE | DIQMTQS | GSFNNYA | GWINPN | CARVS | QASQDIS | SNLQS | QQSYSTPF |
| | VKKPGASVKV | PSSLSAS | IS (SEQ | TGGTSY | YGVGY | RYLN | (SEQ | T (SEQ |
| | SCKASGGSFN | VGDRVTI | ID NO: | A (SEQ | YMDVW | (SEQ ID | ID | ID NO: |
| | NYAISWVRQA | TCQASQD | 699) | ID NO: | (SEQ | NO: | NO: | 632) |
| | PGQGLEWMGW | ISRYLNW | | 700) | ID | 702) | 467) | |
| | INPNTGGTSY | YQQKPGK | | | NO: | | | |
| | AQKFQGRVTM | APKLLIY | | | 701) | | | |
| | TRDTSTSTVY | AASNLQS | | | | | | |
| | MELSSLRSED | GVPSRFS | | | | | | |
| | TAVYYCARVS | GSGSGTD | | | | | | |
| | YGVGYYMDVW | STLTISS | | | | | | |
| | GKGTTVTVSS | LQPEDFA | | | | | | |
| | (SEQ ID | TYYCQQS | | | | | | |
| | NO: 697) | YSTPFTF | | | | | | |
| | | GPGTKVD | | | | | | |
| | | IK (SEQ | | | | | | |
| | | ID NO: | | | | | | |
| | | 703) | | | | | | |
| PD1AB17 | QVQLVQSGAE | DIQMTQS | YTFTDDY | GWMNTN | CARGG | RASQGVG | SSLQS | QQAYSFPW |
| | VKKPGASVKV | PSSLSAS | IH (SEQ | SGNTGY | SYSSG | NALG | (SEQ | T (SEQ |
| | SCKASGYTFT | VGDRVTI | ID NO: | A (SEQ | WYGRL | (SEQ ID | ID | ID NO: |
| | DDYIHWVRQA | TCRASQG | 706) | ID NO: | DYYYG | NO: | NO: | 421) |
| | PGQGLEWMGW | VGNALGW | | 707) | MDVW | 709) | 362) | |
| | MNTNSGNTGY | YQQKPGK | | | (SEQ | | | |
| | AQKFQGRVTM | APKLLIY | | | ID | | | |
| | TRDTSTSTVY | AASSLQS | | | NO: | | | |
| | MELSSLRSED | GVPSRFS | | | 708) | | | |
| | TAVYYCARGG | GSGSGTD | | | | | | |
| | SYSSGWYGRL | FTLTISS | | | | | | |
| | DYYYGMDVWG | LQPEDFA | | | | | | |
| | QGTTVTVSS | TYYCQQA | | | | | | |
| | (SEQ ID | YSFPWTF | | | | | | |
| | NO: 704) | GQGTKLE | | | | | | |
| | | IK (SEQ | | | | | | |
| | | ID NO: | | | | | | |
| | | 705) | | | | | | |
| PD1AB18 | QVQLVQSGAE | DIQMTQS | YTFTDYA | GWLNPN | CAAGL | RASQSIN | SSLES | QQSYSIPI |
| | VKKPGASVKV | PSSLSAS | MH (SEQ | SGNTGY | FIW | RWLA | (SEQ | T (SEQ |
| | SCKASGYTFT | VGDRVTI | ID NO: | A (SEQ | (SEQ | (SEQ ID | ID | ID NO: |
| | DYAMHWVRQA | TCRASQS | 712) | ID NO: | ID | NO: | NO: | 717) |
| | PGQGLEWMGW | INRWLAW | | 713) | NO: | 715) | 716) | |
| | LNPNSGNTGY | YQQKPGK | | | 714) | | | |
| | APKFQGRVTM | APKLLIY | | | | | | |
| | TRDTSTSTVY | DASSLES | | | | | | |
| | MELSSLRSED | GVPSRFS | | | | | | |
| | TAVYYCAAGL | GSGSGTD | | | | | | |
| | FIWGQGTMVT | FTLTISS | | | | | | |
| | VSS (SEQ | LQPEDFA | | | | | | |
| | ID NO: | TYYCQQS | | | | | | |
| | 710) | YSIPITF | | | | | | |
| | | GQGTRLE | | | | | | |
| | | IK (SEQ | | | | | | |
| | | ID NO: | | | | | | |
| | | 711) | | | | | | |
| PD1AB19 | QVQLVQSGAE | DIVMTQS | GTFSSYA | GGIIPG | CTTEY | RSSQSLL | SNRAP | MQALQTPL |
| | VKKPGSSVKV | PLSLPVT | IS (SEQ | FGSPNY | CSSTS | HSNGYNY | (SEQ | T (SEQ |
| | SCKASGGTFS | PGEPASI | ID NO: | A (SEQ | CSDYW | LD (SEQ | ID | ID NO: |
| | SYAISWVRQA | SCRSSQS | 77) | ID NO: | (SEQ | ID NO: | NO: | 723) |
| | PGQGLEWMGG | LLHSNGY | | 720) | ID | 131) | 722) | |
| | IIPGFGSPNY | NYLDWYL | | | NO: | | | |
| | APNFQGRVTI | QKPGQSP | | | 721) | | | |
| | TADESTSTAY | QLLIYQG | | | | | | |
| | MELSSLRSED | SNRAPGV | | | | | | |
| | TAVYYCTTEY | PDRFSGS | | | | | | |
| | CSSTSCSDYW | GSGTDFT | | | | | | |
| | GQGTLVTVSS | LKISRVE | | | | | | |
| | (SEQ ID | AEDVGVY | | | | | | |
| | NO: 718) | YCMQALQ | | | | | | |
| | | TPLTFGQ | | | | | | |
| | | GTKVEIK | | | | | | |
| | | (SEQ ID | | | | | | |
| | | NO: | | | | | | |
| | | 719) | | | | | | |
| PD1AB20 | QVQLVQSGAE | DIQMTQS | YTFSDHY | GTINPS | CAADN | RASQSIS | STLQS | QQSHSLPL |
| | VKKPGASVKV | PSSLSAS | MH (SEQ | GGRTSY | GHASG | NWVA | (SEQ | T (SEQ |
| | SCKASGYTFS | VGDRVTI | ID NO: | A (SEQ | WLYYY | (SEQ ID | ID | ID NO: |
| | DHYMHWVRQA | TCRASQS | 726) | ID NO: | GMDVW | NO: | NO: | 730) |
| | PGQGLEWMGT | ISNWVAW | | 727) | (SEQ | 729) | 420) | |
| | INPSGGRTSY | YQQKPGK | | | ID | | | |
| | AQKFQGRVTM | APKLLIY | | | NO: | | | |
| | TRDTSTSTVY | RASTLQS | | | 728) | | | |
| | MELSSLRSED | GVPSRFS | | | | | | |
| | TAVYYCAADN | GSGSGTD | | | | | | |
| | GHASGWLYYY | FTLTISS | | | | | | |
| | GMDVWGQGTT | LQPEDFA | | | | | | |
| | VTVSS (SEQ | TYYCQQS | | | | | | |
| | ID NO: | HSLPLTF | | | | | | |
| | 724) | GPGTKVD | | | | | | |
| | | IK (SEQ | | | | | | |
| | | ID NO: | | | | | | |
| | | 725) | | | | | | |
| PD1AB21 | EVQLLESGGG | DIQMTQS | FTFSSYA | SGISGG | CASEY | RASQSIS | SSLQS | QQYRNFPY |
| | LVQPGGSLRL | PSSLSAS | MS (SEQ | GGTTYY | YGMDV | GWLA | (SEQ | T (SEQ |
| | SCAASGFTFS | VGDRVTI | ID NO: | A (SEQ | W | (SEQ ID | ID | ID NO: |
| | SYAMSWVRQA | TCRASQS | 473) | ID NO: | (SEQ | NO: | NO: | 736) |
| | PGKGLEWVSG | ISGWLAW | | 733) | ID | 735) | 362) | |
| | ISGGGGTTYY | YQQKPGK | | | NO: | | | |
| | ADSVKGRFTI | APKLLIY | | | 734) | | | |
| | SRDNSKNTLY | AASSLQS | | | | | | |
| | LQMNSLRAED | GVPSRFS | | | | | | |
| | TAVYYCASEY | GSGSGTD | | | | | | |
| | YGMDVWGQGT | FTLTISS | | | | | | |
| | TVTVSS | LQPEDFA | | | | | | |
| | (SEQ ID | TYYCQQY | | | | | | |
| | NO: 731) | RNFPYTF | | | | | | |
| | | GQGTKLE | | | | | | |
| | | IK (SEQ | | | | | | |
| | | ID NO: | | | | | | |
| | | 732) | | | | | | |
| PD1AB22 | QVQLVQSGAE | EIVMTQS | YTFSGYY | GVINPS | CAEGF | RASQGVG | STRAT | QQYYTTPI |
| | VKKPGASVKV | PATLSVS | MH (SEQ | GGSTSY | DYW | RSLA | (SEQ | T (SEQ |
| | SCKASGYTFS | PGERATL | ID NO: | A (SEQ | (SEQ | (SEQ ID | ID | ID NO: |
| | GYYMHWVRQA | SCRASQG | 739) | ID NO: | ID | NO: | NO: | 743) |
| | PGQGLEWMGV | VGRSLAW | | 740) | NO: | 742) | 384) | |
| | INPSGGSTSY | YQQKPGQ | | | 741) | | | |
| | AQKFQGRVTM | APRLLIY | | | | | | |
| | TRDTSTSTVY | GASTRAT | | | | | | |
| | MELSSLRSED | GIPARFS | | | | | | |
| | TAVYYCAEGF | GSGSGTE | | | | | | |
| | DYWGQGTLVT | FTLTISS | | | | | | |
| | VSS (SEQ | LQSEDFA | | | | | | |
| | ID NO: | VYYCQQY | | | | | | |
| | 737) | YTTPITF | | | | | | |
| | | GQGTRLE | | | | | | |
| | | IK (SEQ | | | | | | |
| | | ID NO: | | | | | | |
| | | 738) | | | | | | |
| PD1AB23 | QVQLVQSGAE | DIQMTQS | GTFSNYA | GWMNPN | CARVN | QASQDIS | STLKS | QQADNLPF |
| | VKKPGASVKV | PSSLSAS | IS (SEQ | SGNTGY | YYYYY | NYLN | (SEQ | T (SEQ |
| | SCKASGGTFS | VGDRVTI | ID NO: | A (SEQ | GMDVW | (SEQ ID | ID | ID NO: |
| | NYAISWVRQA | TCQASQD | 746) | ID NO: | (SEQ | NO: | NO: | 749) |
| | PGQGLEWMGW | ISNYLNW | | 205) | ID | 138) | 748) | |
| | MNPNSGNTGY | YQQKPGK | | | NO: | | | |
| | AQKFQGRVTM | APKLLIY | | | 747) | | | |
| | TRDTSTSTVY | KASTLKS | | | | | | |
| | MELSSLRSED | GVPSRFS | | | | | | |
| | TAVYYCARVN | GSGSGTD | | | | | | |
| | YYYYYGMDVW | FTLTISS | | | | | | |
| | GQGTTVTVSS | LQPEDFA | | | | | | |
| | (SEQ ID | TYYCQQA | | | | | | |
| | NO: 744) | DNLPFTF | | | | | | |
| | | GPGTKVD | | | | | | |
| | | IK (SEQ | | | | | | |
| | | ID NO: | | | | | | |
| | | 745) | | | | | | |
| PD1AB24 | QVQLVQSGAE | DIQMTQS | YTFTNYY | GIINPS | CARDW | QASRDIS | SSLQS | QQANSFPP |
| | VKKPGASVKV | PSSLSAS | MH (SEQ | GGSTSY | GWDYY | NYLN | (SEQ | T (SEQ |
| | SCKASGYTFT | VGDRVTI | ID NO: | A (SEQ | YYGMD | (SEQ ID | ID | ID NO: |
| | NYYMHWVRQA | TCQASRD | 148) | ID NO: | VW | NO: | NO: | 754) |
| | PGQGLEWMGI | ISNYLNW | | 69) | (SEQ | 753) | 362) | |
| | INPSGGSTSY | YQQKPGK | | | ID | | | |
| | AQRFQGRVTM | APKLLIY | | | NO: | | | |
| | TRDTSTSTVY | AASSLQS | | | 752) | | | |
| | MELSSLRSED | GVPSRFS | | | | | | |
| | TAVYYCARDW | GSGSGTD | | | | | | |
| | GWDYYYYGMD | FTLTISS | | | | | | |
| | VWGQGTTVTV | LQPEDFA | | | | | | |
| | SS (SEQ ID | TYYCQQA | | | | | | |
| | NO: 750) | NSFPPTF | | | | | | |
| | | GQGTKLE | | | | | | |
| | | IK (SEQ | | | | | | |
| | | ID NO: | | | | | | |
| | | 751) | | | | | | |
| PD1AB25 | EVQLLESGGG | DIVMTQS | FTFSNSD | SGITIS | CARGR | KSSQSVL | STRES | QQYYTTPP |
| | LVQPGGSLRL | PDSLAVS | MS (SEQ | GGSTYY | GGSGW | YSPNNKN | (SEQ | T (SEQ |
| | SCAASGFTFS | LGERATI | ID NO: | A (SEQ | LDYW | YLA | ID | ID NO: |
| | NSDMSWVRQA | NCKSSQS | 757) | ID NO: | (SEQ | (SEQ ID | NO: | 761) |
| | PGKGLEWVSG | VLYSPNN | | 758) | ID | NO: | 378) | |
| | ITISGGSTYY | KNYLAWY | | | NO: | 760) | | |
| | ADSVRGRFTI | QQKPGQP | | | 759) | | | |
| | SRDNSKNTLY | PKLLIYW | | | | | | |
| | LQMSSLRAED | ASTRESG | | | | | | |
| | TAVYYCARGR | VPDRFSG | | | | | | |
| | GGSGWLDYWG | SGSGTDF | | | | | | |
| | QGTLVTVSS | TLTISSL | | | | | | |
| | (SEQ ID | QAEDVAV | | | | | | |
| | NO: 755) | YYCQQYY | | | | | | |
| | | TTPPTFG | | | | | | |
| | | QGTRLEI | | | | | | |
| | | K (SEQ | | | | | | |
| | | ID NO: | | | | | | |
| | | 756) | | | | | | |
| PD1AB26 | QVQLVQSGAE | DIQMTQS | YTFTGYY | GKIVPM | CARGP | RASQSIS | SSLQS | QQANSFPV |
| | VKKPGSSVKV | PSSLSAS | MH (SEQ | FDAANY | KWELD | RWLA | (SEQ | T (SEQ |
| | SCKASGYTFT | VGDRVTI | ID NO: | A (SEQ | TW | (SEQ ID | ID | ID NO: |
| | GYYMHWVRQA | TCRASQS | 128) | ID NO: | (SEQ | NO: | NO: | 403) |
| | PGQGLEWMGK | ISRWLAW | | 670) | ID | 283) | 362) | |
| | IVPMFDAANY | YQQKPGK | | | NO: | | | |
| | APKFQGRVTI | APKLLIY | | | 671) | | | |
| | TADESTSTAY | GASSLQS | | | | | | |
| | MELSSLRSED | GVPSRFS | | | | | | |
| | TAVYYCARGP | GSGSGTD | | | | | | |
| | KWELDTWGQG | FTLTISS | | | | | | |
| | TLVTVSS | LQPEDFA | | | | | | |
| | (SEQ ID | TYYCQQA | | | | | | |
| | NO: 668) | NSFPVTF | | | | | | |
| | | GGGTKVD | | | | | | |
| | | IK (SEQ | | | | | | |
| | | ID NO: | | | | | | |
| | | 762) | | | | | | |
| PD1AB27 | QVQLVQSGAE | DIQMTQS | YTFTGYY | GKIVPM | CARGP | RASQSIS | SSLQS | QQANSFPV |
| | VKKPGSSVKV | PSSLSAS | MH (SEQ | FDAANY | KWELD | RWLA | (SEQ | T (SEQ |
| | SCKASGYTFT | VGDRVTI | ID NO: | A (SEQ | TW | (SEQ ID | ID | ID NO: |
| | GYYMHWVRQA | TCRASQS | 128) | ID NO: | (SEQ | NO: | NO: | 403) |
| | PGQGLEWMGK | ISRWLAW | | 670) | ID | 283) | 362) | |
| | IVPMFDAANY | YQQKPGK | | | NO: | | | |
| | APKFQGRVTI | APKLLIY | | | 671) | | | |
| | TADESTSTAY | GASSLQS | | | | | | |
| | MELSSLRSED | GVPSRFS | | | | | | |
| | TAVYYCARGP | GSGSGTD | | | | | | |
| | KWELDTWGQG | FTFTISS | | | | | | |
| | TLVTVSS | LQPEDFA | | | | | | |
| | (SEQ ID | TYYCQQA | | | | | | |
| | NO: 668) | NSFPVTF | | | | | | |
| | | GGGTKVD | | | | | | |
| | | IK (SEQ | | | | | | |
| | | ID NO: | | | | | | |
| | | 763) | | | | | | |
| PD1AB28 | QVQLVQSGAE | DIQMTQS | GDFSNYF | GWINPH | CARGG | RASQSIS | STLQS | QQSYSTPF |
| | VKKPGSSVKV | PSSLSAS | VS (SEQ | NGDTMY | YSYGY | TWLA | (SEQ | T (SEQ |
| | SCKASGGDFS | VGDRVTI | ID NO: | A (SEQ | TFDIW | (SEQ ID | ID | ID NO: |
| | NYFVSWVRQA | TCRASQS | 766) | ID NO: | (SEQ | NO: | NO: | 632) |
| | PGQGLEWMGW | ISTWLAW | | 767) | ID | 373) | 420) | |
| | INPHNGDTMY | YQQKPGK | | | NO: | | | |
| | AQKFQGRVTI | APKLLIY | | | 768) | | | |
| | TADESTSTAY | AASTLQS | | | | | | |
| | MELSSLRSED | GVPSRFS | | | | | | |
| | TAVYYCARGG | GSGSGTD | | | | | | |
| | YSYGYTFDIW | FTLTISS | | | | | | |
| | GQGTMVTVSS | LQPEDFA | | | | | | |
| | (SEQ ID | TYYCQQS | | | | | | |
| | NO: 764) | YSTPFTF | | | | | | |
| | | GGGTKVE | | | | | | |
| | | IK (SEQ | | | | | | |
| | | ID NO: | | | | | | |
| | | 765) | | | | | | |
| PD1AB29 | EVQLLESGGG | DIVMTQS | FTFSNSD | SGITIS | CARGR | KSSQSVL | STRES | QQYYITPP |
| | LVQPGGSLRL | PDSLAVS | MS (SEQ | GGSTYY | GGSGW | YSPNNKN | (SEQ | T (SEQ |
| | SCAASGFTFS | LGERATI | ID NO: | A (SEQ | LDYW | YLA | ID | ID NO: |
| | NSDMSWVRQA | NCKSSQS | 757) | ID NO: | (SEQ | (SEQ ID | NO: | 771) |
| | PGKGLEWVSG | VLYSPNN | | 758) | ID | NO: | 378) | |
| | ITISGGSTYY | KNYLAWY | | | NO: | 760) | | |
| | ADSVKGRFTI | QQKPGQP | | | 759) | | | |
| | SRDNSKNTLY | PKLLIYW | | | | | | |
| | LQMNSLRAED | ASTRESG | | | | | | |
| | TAVYYCARGR | VPDRFSG | | | | | | |
| | GGSGWLDYWG | SGSGTDF | | | | | | |
| | QGTLVTVSS | TLTISSL | | | | | | |
| | (SEQ ID | QAEDVAV | | | | | | |
| | NO: 769) | YYCQQYY | | | | | | |
| | | ITPPTFG | | | | | | |
| | | QGTRLEI | | | | | | |
| | | K (SEQ | | | | | | |
| | | ID NO: | | | | | | |
| | | 770) | | | | | | |
| PD1AB30 | EVQLLESGGG | DIVMTQS | FTFSNSD | SGITIS | CARGR | KSSQSVL | STRES | QQYYTTPP |
| | LVQPGGSLRL | PDSLAVS | MS (SEQ | GGSTYY | GGSGW | YSPNNKN | (SEQ | T (SEQ |
| | SCAASGFTFS | LGERATI | ID NO: | A (SEQ | LDYW | YLA | ID | ID NO: |
| | NSDMSWVRQA | NCKSSQS | 757) | ID NO: | (SEQ | (SEQ ID | NO: | 761) |
| | PGKGLEWVSG | VLYSPNN | | 758) | ID | NO: | 378) | |
| | ITISGGSTYY | KNYLAWY | | | NO: | 760) | | |
| | ADSVKGRFTI | QQKPGQP | | | 759) | | | |
| | SRDNSKNTLY | PKLLIYW | | | | | | |
| | LQMNSLRAED | ASTRESG | | | | | | |
| | TAVYYCARGR | VPDRFSG | | | | | | |
| | GGSGWLDYWG | SGSGTDF | | | | | | |
| | QGTLVTVSS | TLTISSL | | | | | | |
| | (SEQ ID | QAEDVAV | | | | | | |
| | NO: 769) | YYCQQYY | | | | | | |
| | | TTPPTFG | | | | | | |
| | | QGTRLEI | | | | | | |
| | | K (SEQ | | | | | | |
| | | ID NO: | | | | | | |
| | | 756) | | | | | | |
| PD1AB31 | QVQLVQSGAE | EIVMTQS | HTFTDYY | GIINPS | CASGW | RASQSVS | SSRAT | QQYTTSPI |
| | VKKPGSSVKV | PATLSVS | MH (SEQ | GGSTSY | TDW | SYLA | (SEQ | T (SEQ |
| | SCKASGHTFT | PGERATL | ID NO: | A (SEQ | (SEQ | (SEQ ID | ID | ID NO: |
| | DYYMHWVRQA | SCRASQS | 774) | ID NO: | ID | NO: | NO: | 778) |
| | PGQGLEWMGI | VSSYLAW | | 69) | NO: | 776) | 777) | |
| | INPSGGSTSY | YQQKPGQ | | | 775) | | | |
| | AQKFQGRVTI | APRLLIY | | | | | | |
| | TADESTSTAY | GTSSRAT | | | | | | |
| | MELSSLRSED | GIPARFS | | | | | | |
| | TAVYYCASGW | GSGSGTE | | | | | | |
| | TDWGQGTLVT | FTLTISS | | | | | | |
| | VSS (SEQ | LQSEDFA | | | | | | |
| | ID NO: | VYYCQQY | | | | | | |
| | 772) | TTSPITF | | | | | | |
| | | GQGTRLE | | | | | | |
| | | IKR | | | | | | |
| | | (SEQ ID | | | | | | |
| | | NO: | | | | | | |
| | | 773) | | | | | | |
| PD1AB32 | QVQLVQSGAE | DIQMTQS | YTFTDYY | GGIFPV | CARDH | QASQDIS | KDLHP | QESFSTLT |
| | VKKPGASVKV | PSSLSAS | MH (SEQ | FGSSTY | GSGLD | NYLN | (SEQ | (SEQ ID |
| | SCKASGYTFT | VGDRVTI | ID NO: | A (SEQ | VW | (SEQ ID | ID | NO: 785) |
| | DYYMHWVRQA | TCQASQD | 781) | ID NO: | (SEQ | NO: | NO: | |
| | PGQGLEWMGG | ISNYLNW | | 782) | ID | 138) | 784) | |
| | IFPVFGSSTY | YQQKPGK | | | NO: | | | |
| | AQKFQGRVTM | APKLLIY | | | 783) | | | |
| | TRDTSTSTVY | DAKDLHP | | | | | | |
| | MELSSLRSED | GVPSRFS | | | | | | |
| | TAVYYCARDH | GSGSGTD | | | | | | |
| | GSGLDVWGQG | FTLTISS | | | | | | |
| | TTVTVSS | LQPEDFA | | | | | | |
| | (SEQ ID | TYYCQES | | | | | | |
| | NO: 779) | FSTLTFG | | | | | | |
| | | QGTKVEI | | | | | | |
| | | KR (SEQ | | | | | | |
| | | ID NO: | | | | | | |
| | | 780) | | | | | | |
| PD1AB33 | QVQLVQSGAE | DIQMTQS | YSFTTYY | GIIAPS | CASGW | QASRDIK | SSLQS | QQSYSTPP |
| | VKKPGASVKV | PSSLSAS | MH (SEQ | GGSTSY | VYW | NYLA | (SEQ | T (SEQ |
| | SCKASGYSFT | VGDRVTI | ID NO: | A (SEQ | (SEQ | (SEQ ID | ID | ID NO: |
| | TYYMHWVRQA | TCQASRD | 639) | ID NO: | ID | NO: | NO: | 642) |
| | PGQGLEWMGI | IKNYLAW | | 787) | NO: | 641) | 362) | |
| | IAPSGGSTSY | YQQKPGK | | | 640) | | | |
| | AQKFQGRVTM | APKLLIY | | | | | | |
| | TRDTSTSTVY | AASSLQS | | | | | | |
| | MELSSLRSED | GVPSRFS | | | | | | |
| | TAVYYCASGW | GSGSGTD | | | | | | |
| | VYWGQGTLVT | FTLTISS | | | | | | |
| | VSS (SEQ | LQPEDFA | | | | | | |
| | ID NO: | TYYCQQS | | | | | | |
| | 786) | YSTPPTF | | | | | | |
| | | GPGTKVD | | | | | | |
| | | IK (SEQ | | | | | | |
| | | ID NO: | | | | | | |
| | | 638) | | | | | | |
| PD1AB34 | QVQLVQSGAE | DIQMTQS | YSFTTYY | GIIAPS | CASGW | QASRDIK | SSLQS | QQSYSTPP |
| | VKKPGASVKV | PSSLSAS | MH (SEQ | GGSTSY | VYW | NYLA | (SEQ | T (SEQ |
| | SCKASGYSFT | VGDRVTI | ID NO: | A (SEQ | (SEQ | (SEQ ID | ID | ID NO: |
| | TYYMHWVRQA | TCQASRD | 639) | ID NO: | ID | NO: | NO: | 642) |
| | PGQGLEWMGI | IKNYLAW | | 787) | NO: | 641) | 362) | |
| | IGPSGGSTSY | YQQKPGK | | | 640) | | | |
| | AQKFQGRVTM | APKLLIY | | | | | | |
| | TRDTSTSTVY | AASSLQS | | | | | | |
| | MELSSLRSED | GVPSRFS | | | | | | |
| | TAVYYCASGW | GSGSGTD | | | | | | |
| | VYWGQGTLVT | FTLTISS | | | | | | |
| | VSS (SEQ | LQPEDFA | | | | | | |
| | ID NO: | TYYCQQS | | | | | | |
| | 788) | YSTPPTF | | | | | | |
| | | GPGTKVD | | | | | | |
| | | IK (SEQ | | | | | | |
| | | ID NO: | | | | | | |
| | | 638) | | | | | | |
| PD1AB35 | QVQLVQSGAE | DIQMTQS | YTFSDHY | GTIAPS | CAADN | RASQSIS | STLQS | QQSHSLPL |
| | VKKPGASVKV | PSSLSAS | MH (SEQ | GGRTSY | GHASG | NWVA | (SEQ | T (SEQ |
| | SCKASGYTFS | VGDRVTI | ID NO: | A (SEQ | WLYYY | (SEQ ID | ID | ID NO: |
| | DHYMHWVRQA | TCRASQS | 726) | ID NO: | GMDVW | NO: | NO: | 730) |
| | PGQGLEWMGT | ISNWVAW | | 790) | (SEQ | 729) | 420) | |
| | IAPSGGRTSY | YQQKPGK | | | ID | | | |
| | AQKFQGRVTM | APKLLIY | | | NO: | | | |
| | TRDTSTSTVY | RASTLQS | | | 728) | | | |
| | MELSSLRSED | GVPSRFS | | | | | | |
| | TAVYYCAADN | GSGSGTD | | | | | | |
| | GHASGWLYYY | FTLTISS | | | | | | |
| | GMDVWGQGTT | LQPEDFA | | | | | | |
| | VTVSS (SEQ | TYYCQQS | | | | | | |
| | ID NO: | HSLPLTF | | | | | | |
| | 789) | GPGTKVD | | | | | | |
| | | IK (SEQ | | | | | | |
| | | ID NO: | | | | | | |
| | | 725) | | | | | | |
| PD1AB36 | QVQLVQSGAE | DIQMTQS | YTFSDHY | GTIAPS | CAADN | RASQSIS | STLQS | QQSHSLPL |
| | VKKPGASVKV | PSSLSAS | MH (SEQ | GGRTSY | GHASG | NWVA | (SEQ | T (SEQ |
| | SCKASGYTFS | VGDRVTI | ID NO: | A (SEQ | WLYYY | (SEQ ID | ID | ID NO: |
| | DHYMHWVRQA | TCRASQS | 726) | ID NO: | GMDVW | NO: | NO: | 730) |
| | PGQGLEWMGT | ISNWVAW | | 790) | (SEQ | 729) | 420) | |
| | IGPSGGRTSY | YQQKPGK | | | ID | | | |
| | AQKFQGRVTM | APKLLIY | | | NO: | | | |
| | TRDTSTSTVY | RASTLQS | | | 728) | | | |
| | MELSSLRSED | GVPSRFS | | | | | | |
| | TAVYYCAADN | GSGSGTD | | | | | | |
| | GHASGWLYYY | FTLTISS | | | | | | |
| | GMDVWGQGTT | LQPEDFA | | | | | | |
| | VTVS (SEQ | TYYCQQS | | | | | | |
| | ID NO: | HSLPLTF | | | | | | |
| | 791) | GPGTKVD | | | | | | |
| | | IK (SEQ | | | | | | |
| | | ID NO: | | | | | | |
| | | 725) | | | | | | |

[0438] In some embodiments, the antibody comprises a CDR set as set forth in PD-1 Antibody Table 4. In some embodiments, the antibody comprises the CDRs of Clone ID: PD1AB4, or PD1AB30 of PD-1 Antibody Table 4.

[0439] In some embodiments, the antibody is linked to another antibody or therapeutic. In some embodiments, the PD-1 antibody is linked to a MAdCAM antibody or a IL-2 mutein as provided herein or that is incorporated by reference.

[0440] In some embodiments, the PD-1 antibody comprises a sequence as shown in PD-1 Antibody Table 4. In some embodiments, the antibody is in a scFV format as illustrated in the PD-1 Antibody Table 4. In some embodiments, the antibody comprises a CDR1 from any one of clones of the PD-1 Antibody Table 4, a CDR2 from any any one of clones of the PD-1 Antibody Table 4, and a CDR3 from any one of clones of the PD-1 Antibody Table 4. In some embodiments, the antibody comprises a LCDR1 from any one of clones of the PD-1 Antibody Table 4, a LCDR2 from any any one of clones of the PD-1 Antibody Table 4, and a LCDR3 from any one of clones of the PD-1 Antibody Table 4. In some embodiments, the amino acid residues of the CDRs shown above contain mutations. In some embodiments, the CDRs contain 1, 2, 3, 4, 5, 6, 7, 8, 9, or 10 substitutions or mutations. In some embodiments, the substitution is a conservative substitution.

[0441] In some embodiments, the PD-1 antibody has a VH region selected from any one of clones of the PD-1 Antibody Table 4 and a VL region selected from any one of clones as set forth in the PD-1 Antibody Table 4.

[0442] In some embodiments, as provided for herein, the PD-1 antibody, or binding fragment thereof, is linked directly or indirectly to a MAdCAM antibody or binding fragment thereof. Examples of MAdCAM antibodies are provided herein, but these are non-limiting examples and they can linked to other antibodies as well.

[0443] In some embodiments, the molecule comprises an antibody that binds to PD-1. In some embodiments, the antibody comprises (i) a heavy chain variable region comprising heavy chain CDR1, CDR2, and CDR3 sequences, wherein the heavy chain CDR1 sequence has the amino acid sequence of any of the CDR1 sequences set forth in PD-1 Antibody Table 4; the heavy chain CDR2 has the amino acid sequence of any of the CDR2 sequences set forth in PD-1 Antibody Table 4, and the heavy chain CDR3 has the amino acid sequence of any of the CDR3 sequences set forth in PD-1 Antibody Table 4; or variants of any of the foregoing; and (ii) a light chain variable region comprising light chain CDR1, CDR2, and CDR3 sequences, wherein the light chain CDR1 sequence has the amino acid sequence of any of the LCDR1 sequences set forth in PD-1 Antibody Table 4; the light chain LCDR2 has the amino acid sequence of any of the LCDR2 sequences set forth in PD-1 Antibody Table 4, and the light chain CDR3 has the the amino acid sequence of any of the LCDR3 sequences set forth in PD-1 Antibody Table 4, or variants of any of the foregoing.

[0444] In some embodiments, the antibody comprises a heavy chain variable region comprising heavy chain CDR1, CDR2, and CDR3 sequences, wherein the heavy chain CDR1, CDR2, and CDR3 sequences have the amino acid sequence as set forth in PD1AB4 of PD-1 Antibody Table 4, or variants of any of the foregoing; and (ii) a light chain variable region comprising light chain CDR1, CDR2, and CDR3 sequences, wherein the light chain CDR1, CDR2, and CDR3 sequences have the amino acid sequence as set forth sequence as set forth in PD1AB4 of PD-1 Antibody Table 4, or variants of any of the foregoing.

[0445] In some embodiments, the antibody comprises a heavy chain variable region comprising heavy chain CDR1, CDR2, and CDR3 sequences, wherein the heavy chain CDR1, CDR2, and CDR3 sequences have the amino acid sequence as set forth in PD1AB30 of PD-1 Antibody Table 4, or variants of any of the foregoing; and (ii) a light chain variable region comprising light chain CDR1, CDR2, and CDR3 sequences, wherein the light chain CDR1, CDR2, and CDR3 sequences have the amino acid sequence as set forth sequence as set forth in PD1AB30 of PD-1 Antibody Table 4, or variants of any of the foregoing.

[0446] These are non-limiting illustrative examples and the antibodies can have the CDRs as set forth in the tables provided herein and are explicitly referenced without writing out the previous paragraphs for each CDR set.

[0447] In some embodiments, the PD-1 antibody comprises a VH and VL(VK) chain as provided herein, such as those listed in the PD-1 Antibody Table 4. In some embodiments, the VH peptide comprises a sequence of SEQ ID NO: 637, or 769. In some embodiments, the VK chain comprises a sequence of SEQ ID NO: 638, or 756. In some embodiments, the antibody comprises a VH of SEQ ID NO: 637 and a VK of SEQ ID NO: 638. In some embodiments, the antibody comprises a VH of SEQ ID NO: 769 and a VK of SEQ ID NO: 759. The VH and VK can also be in a scFV format.

[0448] In some embodiments, as provided for herein, the MAdCAM antibody, or binding fragment thereof, is linked directly or indirectly to a IL-2 mutein or binding fragment thereof. The IL-2 mutein can be any mutein as provided for herein or other IL-2 muteins known to one of skill in the art. In some embodiments, as provided herein, the MAdCAM antibody, or binding fragment thereof, is linked directly or indirectly to a PD-1 antibody, such as those described herein.

[0449] In some embodiments, as provided for herein, the PD-1 antibody, or binding fragment thereof, is linked directly or indirectly to a IL-2 mutein or binding fragment thereof. The IL-2 mutein can be any mutein as provided for herein or other IL-2 muteins known to one of skill in the art. In some embodiments, as provided herein, the PD-1 antibody, or binding fragment thereof, is linked directly or indirectly to a MAdCAM antibody, such as those described herein.

[0450] In some embodiments, the PD-1 antibody comprises a sequence as shown in PD-1 Antibody Table 4 1. In some embodiments, the antibody is in a scFV format. In some embodiments, the antibody comprises a VH sequence from any one of clones of PD-1 Antibody Table 4 1. In some embodiments, the antibody comprises a VK sequence from any one of clonse of the PD-1 Antibody Table 4 1. In some embodiments, the amino acid residues of the VH or VK shown above contain mutations. In some embodiments, the VH or VK contain 1, 2, 3, 4, 5, 6, 7, 8, 9, or 10 substitutions or mutations. In some embodiments, the substitution is a conservative substitution.

[0451] The molecules comprising a MAdCAM Ab and a PD-1 Ab can be various formats as described herein. For example, they can be in the following formats:

### PD-1 ML-N Format:

### Heavy Chain: NT-[VH_PD-1]-[CH1-CH2-CH3]-[LinkerA]-[MAdCAMscFv]-CT

### Light Chain: NT-[VK_PD-1]-[CK]-CT

### PD-1 ML-C Format:

### Heavy Chain: NT-[VH_MAdCAM]-[CH1-CH2-CH3]-[LinkerA]-[PD-1scFv]-CT

### Light Chain: NT-[VK_MAdCAM]-[CK]-CT

### PD-1 IgG Format:

### Heavy Chain: NT-[VH_PD-1]-[CH1-CH2-CH3]

### Light Chain: NT-[VK_PD-1]-[CK]-CT

[0452] The abbreviations used above are as follows:

| Component | Description |
|---|---|
| NT | N-terminus |
| CT | C-terminus |
| VH_PD-1 | VH domain of PD-1 antibody |
| | as provided herein. |
| VK_PD-1 | VK domain of PD-1 antibody |
| | as provided herein. |
| PD-1scFv | PD-1 antibody in scFv |
| | comprising the VH and VK |
| | domain. |
| VH_MAdCAM | VH domain of-MAdCAM Ab |
| | as provided herein. |
| VK_MAdCAM | VK domain of-MAdCAM Ab |
| | as provided herein. This can |
| | also be substituted with a VL |
| | sequences as provided herein. |
| MAdCAMscFv | MAdCAM scFV Ab as |
| | provided herein. |
| VH_MAdCAM_BM1 | Rat anti-mouse MAdCAM |
| | placeholder VH domain |
| VK_MAdCAM_BM1 | Rat anti-mouse MAdCAM |
| | placeholder VK domain |
| MAdCAMscFv_BM1 | Rat anti-mouse MAdCAM |
| | placeholder scFv |
| VH_PD-1_BM1 | Anti-human PD-1 agonist |
| | placeholder VH domain |
| VK_PD-1_BM1 | Anti-human PD-1 agonist |
| | placeholder VK domain |
| CH1—CH2—CH3 | Human IgG1 Constant Heavy |
| | 1 (CH1), Constant Heavy 2 |
| | (CH2), and Constant Heavy 3 |
| | (CH3) domains |
| CK | Human constant kappa |
| | domain |
| IL-2_Mutein | IL-2 moiety such as those |
| | provided herein. |
| Linker_A | Gly/Ser linker (5 amino acid |
| | length) |
| Linker_B | Gly/Ser linker (15 amino acid |
| | length) |

The sequence of CH1-CH2-CH3 can be, for example,

(SEQ ID NO: 44)
ASTKGPSVFPLAPSSKSTSGGTAALGCLVKDYFPEPVTVSWNSGALTS
GVHTFPAVLQSSGLYSLSSVVTVPSSSLGTQTYICNVNHKPSNTKVDK
KVEPKSCDKTHTCPPCPAPEAAGAPSVFLFPPKPKDTLMISRTPEVTC
VVVDVSHEDPEVKFNWYVDGVEVHNAKTKPREEQYNSTYRVVSVLTVL
HQDWLNGKEYKCKVSNKALPAPIEKTISKAKGQPREPQVYTLPPSREE
MTKNQVSLTCLVKGFYPSDIAVEWESNGQPENNYKTTPPVLDSDGSFF
LYSKLTVDKSRWQQGNVFSCSVMHEALHNHYTQKSLSLSPG

The sequence of CK can be, for example,

(SEQ ID NO: 45)
[sequence omitted]

[0453] In some embodiments, if the therapeutic compound comprises a Fc portion, the Fc domain, (portion) bears mutations to render the Fc region “effectorless” that is unable to bind FcRs. The mutations that render Fc regions effectorless are known. In some embodiments, the mutations in the Fc region, which is according to the known numbering system, are selected from the group consisting of: K322A, L234A, L235A, G237A, L234F, L235E, N297, P331S, or any combination thereof. In some embodiments, the Fc mutations comprises a mutation at L234 and/or L235 and/or G237. In some embodiments, the Fc mutations comprise L234A and/or L235A mutations, which can be referred to as LALA mutations. In some embodiments, the Fc mutations comprise L234A, L235A, and G237A mutations.

[0454] Disclosed herein are Linker Region polypeptides, therapeutic peptides, and nucleic acids encoding the polypeptides (e.g., therapeutic compounds), vectors comprising the nucleic acid sequences, and cells comprising the nucleic acids or vectors.

[0455] Therapeutic compounds can comprise a plurality of specific targeting moieties. In some embodiments, the therapeutic compound comprises a plurality one specific targeting moiety, a plurality of copies of a donor specific targeting moiety or a plurality of tissue specific targeting moieties. In some embodiments, a therapeutic compound comprises a first and a second donor specific targeting moiety, e.g., a first donor specific targeting moiety specific for a first donor target and a second donor specific targeting moiety specific for a second donor target, e.g., wherein the first and second target are found on the same donor tissue. In some embodiments, the therapeutic compound comprises e.g., a first specific targeting moiety for a tissue specific target and a second specific targeting moiety for a second target, e.g., wherein the first and second target are found on the same or different target tissue.

[0456] In some embodiments, a therapeutic compound comprises a plurality of effector binding/modulating moieties each comprising an ICIM binding/modulating moiety, the number of ICIM binding/modulating moieties is sufficiently low that clustering of the ICIM binding/modulating moiety's ligand on immune cells (in the absence of target binding) is minimized, e.g., to avoid systemic agonizing of immune cells in the absence of binding of the therapeutic compound to target.

[0457] In some embodiments, the therapeutic compound has the formula from N-terminus to C-terminus:

[0458] A1-Linker A-A2-Linker B-A3

[0459] A3-Linker A-A2-Linker B-A1,

wherein,

[0460] A1 and A3, each independently comprises an effector binding/modulating moiety, e.g., an WWI binding/modulating moiety, an IIC binding/modulating moiety, ICSM binding/modulating moiety, or an SM binding/modulating moiety; or a specific targeting moiety,

[0461] A2 comprises an Fc region or is absent; and

[0462] Linker A and Linker B, each are independent linkers.

[0463] In some embodiments,

[0464] A1 comprises an IL-2 mutein molecule,

[0465] A3 comprises a specific targeting moiety, e.g. anti-human MAdCAM Ab, such as a scFv,

[0466] A2 comprises an Fc region, and

[0467] Linker A and Linker B, each are independent linkers further comprising glycine/serine linkers.

[0468] In some embodiments, A1 or A3 is a PD-1 Ab.

[0469] In some embodiments, a PD-1 antibody is the PD-1 antibody as set forth in PD-1 Antibody Table 4.

[0470] In some embodiments, A1 is a PD-1 Ab and A3 is a MAdCAM Ab.

[0471] In some embodiments, A1 is a IL-2 muteins and A3 is a PD-1 Ab.

[0472] In some embodiments, a polypeptide is provided, wherein the polypeptide comprises a peptide of the formula

[0473] Ab-ConstantDomain-LinkerA-IL2Mutein-LinkerB-FcRegion, wherein the Ab is a variable heavy chain domain that binds to MAdCAM, the Constant domain is an Ig constant domain such as IgG1, IgG2, IgG3, or IgG4, Linker A is a linker, such as those provided herein, and the IL2Mutein is an IL-2 mutein, such as those provided for herein. In some embodiments, the variable heavy domain is a variable heavy chain domain as illustrated in MAdCAM Antibody Table 2. In some embodiments, the variable heavy chain domain comprises the variable heavy chain domain of Clone ID: 6, 75, or 79 of MAdCAM Antibody Table 2. In some embodiments, the variable heavy chain domain comprises the CDRs of the heavy domain of 6, 75, or 79 of MAdCAM Antibody Table 2. In some embodiments, the VH comprises a sequence of SEQ ID NO: 414, SEQ ID NO: 591, and SEQ ID NO: 599.

[0474] In some embodiments, the ConstantDomain comprises a IgG1 constant domain, such as those provided for herein. In some embodiments, the constant domain comprises mutations to render the constant region “effectorless,” that is unable to bind FcRs. The mutations that render constant regions effectorless are known. In some embodiments, the mutations in the constant region, which is according to the known numbering system, are selected from the group consisting of: K322A, L234A, L235A, G237A, L234F, L235E, N297, P331S, or any combination thereof. In some embodiments, the constant region mutations comprises a mutation at L234 and/or L235 and/or G237. In some embodiments, the constant region mutations comprise L234A and/or L235A mutations, which can be referred to as LALA mutations. In some embodiments, the constant region mutations comprise L234A, L235A, and G237A mutations. In some embodiments, the ConstantDomain comprises SEQ ID NO: 44.

[0475] In some embodiments, the variable heavy chain domain comprises a first CDR of SEQ ID NO: 90, a second CDR of SEQ ID NO: 91, and a third CDR of SEQ ID NO: 92. In some embodiments, the variable heavy chain domain comprises a first CDR of SEQ ID NO: 359, a second CDR of SEQ ID NO: 170, and a third CDR of SEQ ID NO: 360. In some embodiments, the variable heavy chain domain comprises a first CDR of SEQ ID NO: 135, a second CDR of SEQ ID NO: 381, and a third CDR of SEQ ID NO: 382. These are illustrative only and the CDR sets as set forth herein and in the tables are also provided.

[0476] In some embodiments, the LinkerA is a glycine/serine linker, which can be any glycine/serine linker provided for herein. In some embodiments, the linker is a sequence of GGGGSGGGGSGGGGSGGGGS (SEQ ID NO: 22) or GGGGSGGGGSGGGGS (SEQ ID NO: 30). These are non-limiting examples and the linker can have varying number of GGGGS (SEQ ID NO: 23) or GGGGA repeats (SEQ ID NO: 29), or a mixture of the two. In some embodiments, the linker comprises 1, 2, 3, 4, 5, 6, 7, 8, 9, or 10 of the GGGGS (SEQ ID NO: 23) and/or GGGGA repeats (SEQ ID NO: 29) repeats. In some embodiments, the linker is 10 amino acids in length. In some embodiments, the linker is 5 amino acids in length. In some embodiments, the linker is 15 amino acids in length. In some embodiments, the linker is 20 amino acids in length. In some embodiments, the linker is 25 amino acids in length. In some embodiments, the linker is 30 amino acids in length. In some embodiments, the linker is 35 amino acids in length. In some embodiments, the linker is from 5-50 amino acids in length.

[0477] In some embodiments, the IL-2 mutein comprises a sequence of SEQ ID NO: 31. In some embodiments, the IL-2 mutein comprises a sequence of SEQ ID NO: 32. In some embodiments, the IL-2 mutein comprises a sequence of SEQ ID NO: 33. In some embodiments, the IL-2 mutein comprises a sequence of SEQ ID NO: 34. In some embodiments, the IL-2 mutein comprises a sequence of SEQ ID NO: 35. In some embodiments, the IL-2 mutein comprises a sequence of SEQ ID NO: 36. In some embodiments, the IL-2 mutein comprises a sequence of SEQ ID NO: 37. In some embodiments, the IL-2 mutein comprises a sequence of SEQ ID NO: 38. In some embodiments, the IL-2 mutein comprises a sequence of SEQ ID NO: 39. In some embodiments, the IL-2 mutein comprises a sequence of SEQ ID NO: 40. In some embodiments, the IL-2 mutein comprises a sequence of SEQ ID NO: 41. In some embodiments, the IL-2 mutein further comprises a T3A substitution (mutation). In some embodiments, the Fc Region comprises a peptide having a sequence of SEQ ID NO: 21. In some embodiments, the Fc Region comprises a peptide having a sequence of SEQ ID NO: 28. In some embodiments, the C-terminus of the Fc Region is linked to the N-terminus or the C-terminus of the variable heavy chain or IL-2 mutein. In some embodiments, the linker linking the Fc Region to the variable heavy chain or the IL-2 mutein is a glycine/serine or a glycine/alanine linker. In some embodiments, the linker linking the Fc region to the C- or N-terminus of the variable heavy chain or IL-2 mutein is a glycine/serine linker, which can be a sequence of GGGGSGGGGSGGGGSGGGGS (SEQ ID NO: 22) or GGGGSGGGGSGGGGS (SEQ ID NO: 30). These are non-limiting examples and the linker can have varying number of GGGGS (SEQ ID NO: 23) or GGGGA repeats (SEQ ID NO: 29), or a mixture of the two. In some embodiments, the linker comprises 1, 2, 3, 4, 5, 6, 7, 8, 9, or 10 of the GGGGS (SEQ ID NO: 23) and/or GGGGA repeats (SEQ ID NO: 29) repeats. In some embodiments, the linker is 10 amino acids in length. In some embodiments, the linker is 5 amino acids in length. In some embodiments, the linker is 15 amino acids in length. In some embodiments, the linker is 20 amino acids in length. In some embodiments, the linker is 25 amino acids in length. In some embodiments, the linker is 30 amino acids in length. In some embodiments, the linker is 35 amino acids in length. In some embodiments, the linker is from 5-50 amino acids in length.

[0478] In some embodiments, the polypeptide further comprises a polypeptide of formula VL-ConstantDomainLight, wherein VL is a variable light chain and ConstantDomainLight is a IgG light chain constant domain, wherein the polypeptide can be or is associated with the polypeptide having the formula of Ab-ConstantDomain-LinkerA-IL2Mutein-LinkerB-FcRegion. In some embodiments, the VL comprises a sequence of SEQ ID NO: 415, SEQ ID NO: 592 or SEQ ID NO: 600. These are illustrative only and the VL domain can be VL/VK sequence provided for herein, such as in MAdCAM Antibody Table 2. In some embodiments, the variable light chain domain comprises a first CDR of SEQ ID NO: 93, a second CDR of SEQ ID NO: 87, and a third CDR of SEQ ID NO: 94. In some embodiments, the variable light chain domain comprises a first CDR of SEQ ID NO: 361, a second CDR of SEQ ID NO: 362, and a third CDR of SEQ ID NO: 363. In some embodiments, the variable heavy chain domain comprises a first CDR of SEQ ID NO: 383, a second CDR of SEQ ID NO: 384, and a third CDR of SEQ ID NO: 385. These are illustrative only and the CDR sets as set forth herein and in the tables are also provided.

[0479] In some embodiments, the constant domain also comprises mutations to negate the effector function, such as those provided for herein. In some embodiments, the ConstantDomainLight comprises a sequence of:

(SEQ ID NO: 45)
[sequence omitted]

[0480] The different polypeptides of formula IL2Mutein-LinkerA-FcRegion-LinkerB-Ab and VL-ConstantDomainLight can be interchanged with one another. In some embodiments, the polypeptide comprises a variable heavy chain comprising a first CDR of SEQ ID NO: 90, a second CDR of SEQ ID NO: 91, and a third CDR of SEQ ID NO: 92 and a variable light chain comprising a first CDR of SEQ ID NO: 93, a second CDR of SEQ ID NO: 87, and a third CDR of SEQ ID NO: 94. In some embodiments, the polypeptide comprises a variable heavy chain comprising a first CDR of SEQ ID NO: 359, a second CDR of SEQ ID NO: 170, and a third CDR of SEQ ID NO: 360 and a variable light chain comprising a first CDR of SEQ ID NO: 361, a second CDR of SEQ ID NO: 362, and a third CDR of SEQ ID NO: 363. In some embodiments, the polypeptide comprises a variable heavy chain comprising a first CDR of SEQ ID NO: 135, a second CDR of SEQ ID NO: 381, and a third CDR of SEQ ID NO: 382 and a variable light chain comprising a first CDR of SEQ ID NO: 383, a second CDR of SEQ ID NO: 384, and a third CDR of SEQ ID NO: 385. These are non-limiting examples and the CDR combinations as illustrated in the MAdCAM Antibody Tables 1 and 2 can be also be used and are provided for herein.

[0481] In some embodiments, compounds are provided comprising the following formula, from N-terminus to C-terminus:

[0482] IL2Mutein-LinkerA-FcRegion-LinkerB-Ab, wherein the IL2Mutein is any IL-2 mutein that can, for example, preferentially activate Tregs; the LinkerA and Linker B are, each, independently, a linker as provided herein, the Fc Region can any one of such as provided herein, and the Ab is a tissue targeting moiety, such as those provided herein. In some embodiments, the Ab is an antibody that binds to MAdCAM, PD-1, or another cell surface target as provided herein. In some embodiments, the antibody is in a scFV format. In some embodiments, the antibody in scFV format is an antibody as provided in the MAdCAM Antibody Table 1. In some embodiments, the antibody in scFV format is an antibody that comprises the CDRs as set forth in MAdCAM Antibody Table 1 or MAdCAM Antibody Table 2.

[0483] In some embodiments, the C-terminus of the IL-2 mutein is linked to the N-terminus of the Fc region. In some embodiments, the linkage is direct or through a linker, such as those described herein. In some embodiments, the linker is a glycine/serine linker. In some embodiments, the linker linking the IL-2 mutein to the Fc region is a glycine/serine linker, which can be a sequence of GGGGSGGGGSGGGGSGGGGS (SEQ ID NO: 22) or GGGGSGGGGSGGGGS (SEQ ID NO: 30). These are non-limiting examples and the linker can have varying number of GGGGS (SEQ ID NO: 23) or GGGGA repeats (SEQ ID NO: 29), or a mixture of the two. In some embodiments, the linker comprises 1, 2, 3, 4, 5, 6, 7, 8, 9, or 10 of the GGGGS (SEQ ID NO: 23) and/or GGGGA repeats (SEQ ID NO: 29) repeats. In some embodiments, the linker is 10 amino acids in length. In some embodiments, the linker is 5 amino acids in length. In some embodiments, the linker is 15 amino acids in length. In some embodiments, the linker is 20 amino acids in length. In some embodiments, the linker is 25 amino acids in length. In some embodiments, the linker is 30 amino acids in length. In some embodiments, the linker is 35 amino acids in length. In some embodiments, the linker is from 5-50 amino acids in length.

[0484] In some embodiments, the IL-2 mutein comprises a sequence of SEQ ID NO: 31. In some embodiments, the IL-2 mutein comprises a sequence of SEQ ID NO: 32. In some embodiments, the IL-2 mutein comprises a sequence of SEQ ID NO: 33. In some embodiments, the IL-2 mutein comprises a sequence of SEQ ID NO: 34. In some embodiments, the IL-2 mutein comprises a sequence of SEQ ID NO: 35. In some embodiments, the IL-2 mutein comprises a sequence of SEQ ID NO: 36. In some embodiments, the IL-2 mutein comprises a sequence of SEQ ID NO: 37. In some embodiments, the IL-2 mutein comprises a sequence of SEQ ID NO: 38. In some embodiments, the IL-2 mutein comprises a sequence of SEQ ID NO: 39. In some embodiments, the IL-2 mutein comprises a sequence of SEQ ID NO: 40. In some embodiments, the IL-2 mutein comprises a sequence of SEQ ID NO: 41. In some embodiments, the IL-2 mutein further comprises a T3A substitution (mutation). In some embodiments, the Fc Region comprises a peptide having a sequence of SEQ ID NO: 21. In some embodiments, the Fc Region comprises a peptide having a sequence of SEQ ID NO: 28. In some embodiments, the C-terminus of the Fc Region is linked to the N-terminus of the variable heavy chain. In some embodiments, the linker linking the Fc Region to the variable heavy chain is a glycine/serine or a glycine/alanine linker. In some embodiments, the linker linking the Fc region to the N-terminus of the variable heavy chain is a glycine/serine linker, which can be a sequence of GGGGSGGGGSGGGGSGGGGS (SEQ ID NO: 22) or GGGGSGGGGSGGGGS (SEQ ID NO: 30). These are non-limiting examples and the linker can have varying number of GGGGS (SEQ ID NO: 23) or GGGGA repeats (SEQ ID NO: 29), or a mixture of the two. In some embodiments, the linker comprises 1, 2, 3, 4, 5, 6, 7, 8, 9, or 10 of the GGGGS (SEQ ID NO: 23) and/or GGGGA repeats (SEQ ID NO: 29) repeats. In some embodiments, the linker is 10 amino acids in length. In some embodiments, the linker is 5 amino acids in length. In some embodiments, the linker is 15 amino acids in length. In some embodiments, the linker is 20 amino acids in length. In some embodiments, the linker is 25 amino acids in length. In some embodiments, the linker is 30 amino acids in length. In some embodiments, the linker is 35 amino acids in length. In some embodiments, the linker is from 5-50 amino acids in length.

[0485] In some embodiments, the variable heavy chain comprises the CDRs as set forth in MAdCAM Antibody Table 1 or MAdCAM Antibody Table 2. In some embodiments, the variable heavy chain comprises a HCDR1, HCDR2, and a HCDR3, wherein the HCDR1, HCDR2, and a HCDR3 are as set forth in MAdCAM Antibody Table 1 or MAdCAM Antibody Table 2. In some embodiments, the variable heavy chain has a HCDR1, HCDR2, and a HCDR3 as set forth for Clone 1 in MAdCAM Antibody Table 1. In some embodiments, the variable heavy chain has a HCDR1, HCDR2, and a HCDR3 as set forth for Clone 2 in MAdCAM Antibody Table 1. In some embodiments, the variable heavy chain has a HCDR1, HCDR2, and a HCDR3 as set forth for Clone 3 in MAdCAM Antibody Table 1. In some embodiments, the variable heavy chain has a HCDR1, HCDR2, and a HCDR3 as set forth for Clone 4 in MAdCAM Antibody Table 1. In some embodiments, the variable heavy chain has a HCDR1, HCDR2, and a HCDR3 as set forth for Clone 5 in MAdCAM Antibody Table 1. In some embodiments, the variable heavy chain has a HCDR1, HCDR2, and a HCDR3 as set forth for Clone 6 in MAdCAM Antibody Table 1. In some embodiments, the variable heavy chain has a HCDR1, HCDR2, and a HCDR3 as set forth for Clone 7 in MAdCAM Antibody Table 1. In some embodiments, the variable heavy chain has a HCDR1, HCDR2, and a HCDR3 as set forth for Clone 8 in MAdCAM Antibody Table 1. In some embodiments, the variable heavy chain has a HCDR1, HCDR2, and a HCDR3 as set forth for Clone 9 in MAdCAM Antibody Table 1. In some embodiments, the variable heavy chain has a HCDR1, HCDR2, and a HCDR3 as set forth for Clone 10 in MAdCAM Antibody Table 1. In some embodiments, the variable heavy chain has a HCDR1, HCDR2, and a HCDR3 as set forth for Clone 11 in MAdCAM Antibody Table 1. In some embodiments, the variable heavy chain has a HCDR1, HCDR2, and a HCDR3 as set forth for Clone 12 in MAdCAM Antibody Table 1. In some embodiments, the variable heavy chain has a HCDR1, HCDR2, and a HCDR3 as set forth for Clone 13 in MAdCAM Antibody Table 1. In some embodiments, the variable heavy chain has a HCDR1, HCDR2, and a HCDR3 as set forth for Clone 14 in MAdCAM Antibody Table 1. In some embodiments, the variable heavy chain has a HCDR1, HCDR2, and a HCDR3 as set forth for Clone 15 in MAdCAM Antibody Table 1. In some embodiments, the variable heavy chain has a HCDR1, HCDR2, and a HCDR3 as set forth for Clone 16 in MAdCAM Antibody Table 1. In some embodiments, the variable heavy chain has a HCDR1, HCDR2, and a HCDR3 as set forth for Clone 17 in MAdCAM Antibody Table 1. In some embodiments, the variable heavy chain has a HCDR1, HCDR2, and a HCDR3 as set forth for Clone 1 in MAdCAM Antibody Table 1. In some embodiments, the variable heavy chain has a HCDR1, HCDR2, and a HCDR3 as set forth for Clone 18 in MAdCAM Antibody Table 1. In some embodiments, the variable heavy chain has a HCDR1, HCDR2, and a HCDR3 as set forth for Clone 19 in MAdCAM Antibody Table 1. In some embodiments, the variable heavy chain has a HCDR1, HCDR2, and a HCDR3 as set forth for Clone 20 in MAdCAM Antibody Table 1. In some embodiments, the variable heavy chain has a HCDR1, HCDR2, and a HCDR3 as set forth for Clone 21 in MAdCAM Antibody Table 1. In some embodiments, the variable heavy chain has a HCDR1, HCDR2, and a HCDR3 as set forth for Clone 22 in MAdCAM Antibody Table 1. In some embodiments, the variable heavy chain has a HCDR1, HCDR2, and a HCDR3 as set forth for Clone 23 in MAdCAM Antibody Table 1. In some embodiments, the variable heavy chain has a HCDR1, HCDR2, and a HCDR3 as set forth for Clone 24 in MAdCAM Antibody Table 1. In some embodiments, the variable heavy chain has a HCDR1, HCDR2, and a HCDR3 as set forth for Clone 25 in MAdCAM Antibody Table 1. In some embodiments, the variable heavy chain has a HCDR1, HCDR2, and a HCDR3 as set forth for Clone 26 in MAdCAM Antibody Table 1. In some embodiments, the variable heavy chain has a HCDR1, HCDR2, and a HCDR3 as set forth for Clone 27 in MAdCAM Antibody Table 1. In some embodiments, the variable heavy chain has a HCDR1, HCDR2, and a HCDR3 as set forth for Clone 28 in MAdCAM Antibody Table 1. In some embodiments, the variable heavy chain has a HCDR1, HCDR2, and a HCDR3 as set forth for Clone 29 in MAdCAM Antibody Table 1. In some embodiments, the variable heavy chain has a HCDR1, HCDR2, and a HCDR3 as set forth for Clone 30 in MAdCAM Antibody Table 1. In some embodiments, the variable heavy chain has a HCDR1, HCDR2, and a HCDR3 as set forth for Clone 31 in MAdCAM Antibody Table 1. In some embodiments, the variable heavy chain has a HCDR1, HCDR2, and a HCDR3 as set forth for Clone 32 in MAdCAM Antibody Table 1. In some embodiments, the variable heavy chain has a HCDR1, HCDR2, and a HCDR3 as set forth for Clone 33 in MAdCAM Antibody Table 1. In some embodiments, the variable heavy chain has a HCDR1, HCDR2, and a HCDR3 as set forth for Clone 34 in MAdCAM Antibody Table 1. In some embodiments, the variable heavy chain has a HCDR1, HCDR2, and a HCDR3 as set forth for Clone 35 in MAdCAM Antibody Table 1. In some embodiments, the variable heavy chain has a HCDR1, HCDR2, and a HCDR3 as set forth for Clone 36 in MAdCAM Antibody Table 1. In some embodiments, the variable heavy chain has a HCDR1, HCDR2, and a HCDR3 as set forth for Clone 37 in MAdCAM Antibody Table 1. In some embodiments, the variable heavy chain has a HCDR1, HCDR2, and a HCDR3 as set forth for Clone 38 in MAdCAM Antibody Table 1. In some embodiments, the variable heavy chain has a HCDR1, HCDR2, and a HCDR3 as set forth for Clone 39 in MAdCAM Antibody Table 1. In some embodiments, the variable heavy chain has a HCDR1, HCDR2, and a HCDR3 as set forth for Clone 40 in MAdCAM Antibody Table 1. In some embodiments, the variable heavy chain has a HCDR1, HCDR2, and a HCDR3 as set forth for Clone 41 in MAdCAM Antibody Table 1. In some embodiments, the variable heavy chain has a HCDR1, HCDR2, and a HCDR3 as set forth for Clone 42 in MAdCAM Antibody Table 1. In some embodiments, the variable heavy chain has a HCDR1, HCDR2, and a HCDR3 as set forth for Clone 43 in MAdCAM Antibody Table 1. In some embodiments, the variable heavy chain has a HCDR1, HCDR2, and a HCDR3 as set forth for Clone 44 in MAdCAM Antibody Table 1. In some embodiments, the variable heavy chain has a HCDR1, HCDR2, and a HCDR3 as set forth for Clone 45 in MAdCAM Antibody Table 1. In some embodiments, the variable heavy chain has a HCDR1, HCDR2, and a HCDR3 as set forth for Clone 46 in MAdCAM Antibody Table 1. In some embodiments, the variable heavy chain has a HCDR1, HCDR2, and a HCDR3 as set forth for Clone 47 in MAdCAM Antibody Table 1. In some embodiments, the variable heavy chain has a HCDR1, HCDR2, and a HCDR3 as set forth for Clone 48 in MAdCAM Antibody Table 1. In some embodiments, the variable heavy chain has a HCDR1, HCDR2, and a HCDR3 as set forth for Clone 49 in MAdCAM Antibody Table 1. In some embodiments, the variable heavy chain has a HCDR1, HCDR2, and a HCDR3 as set forth for Clone 50 in MAdCAM Antibody Table 1. In some embodiments, the variable heavy chain has a HCDR1, HCDR2, and a HCDR3 as set forth for Clone 51 in MAdCAM Antibody Table 1. In some embodiments, the variable heavy chain has a HCDR1, HCDR2, and a HCDR3 as set forth for Clone 52 in MAdCAM Antibody Table 1. In some embodiments, the variable heavy chain has a HCDR1, HCDR2, and a HCDR3 as set forth for Clone 53 in MAdCAM Antibody Table 1. In some embodiments, the variable heavy chain has a HCDR1, HCDR2, and a HCDR3 as set forth for Clone 54 in MAdCAM Antibody Table 1. In some embodiments, the variable heavy chain has a HCDR1, HCDR2, and a HCDR3 as set forth for Clone 55 in MAdCAM Antibody Table 1. In some embodiments, the variable heavy chain has a HCDR1, HCDR2, and a HCDR3 as set forth for Clone 56 in MAdCAM Antibody Table 1. In some embodiments, the variable heavy chain has a HCDR1, HCDR2, and a HCDR3 as set forth for Clone 57 in MAdCAM Antibody Table 1. In some embodiments, the variable heavy chain has a HCDR1, HCDR2, and a HCDR3 as set forth for Clone 58 in MAdCAM Antibody Table 1. In some embodiments, the variable heavy chain has a HCDR1, HCDR2, and a HCDR3 as set forth for Clone 59 in MAdCAM Antibody Table 1. In some embodiments, the variable heavy chain has a HCDR1, HCDR2, and a HCDR3 as set forth for Clone 60 in MAdCAM Antibody Table 1. In some embodiments, the variable heavy chain has a HCDR1, HCDR2, and a HCDR3 as set forth for Clone 61 in MAdCAM Antibody Table 1. In some embodiments, the variable heavy chain has a HCDR1, HCDR2, and a HCDR3 as set forth for Clone 62 in MAdCAM Antibody Table 1. In some embodiments, the variable heavy chain has a HCDR1, HCDR2, and a HCDR3 as set forth for Clone 63 in MAdCAM Antibody Table 1. In some embodiments, the variable heavy chain has a HCDR1, HCDR2, and a HCDR3 as set forth for Clone 64 in MAdCAM Antibody Table 1. In some embodiments, the variable heavy chain has a HCDR1, HCDR2, and a HCDR3 as set forth for Clone 65 in MAdCAM Antibody Table 1. In some embodiments, the variable heavy chain has a HCDR1, HCDR2, and a HCDR3 as set forth for Clone 66 in MAdCAM Antibody Table 1.

[0486] In some embodiments, the variable heavy chain has a HCDR1, HCDR2, and a HCDR3 as set forth for Clone 1 in MAdCAM Antibody Table 2. In some embodiments, the variable heavy chain has a HCDR1, HCDR2, and a HCDR3 as set forth for Clone 2 in MAdCAM Antibody Table 2. In some embodiments, the variable heavy chain has a HCDR1, HCDR2, and a HCDR3 as set forth for Clone 3 in MAdCAM Antibody Table 2. In some embodiments, the variable heavy chain has a HCDR1, HCDR2, and a HCDR3 as set forth for Clone 4 in MAdCAM Antibody Table 2. In some embodiments, the variable heavy chain has a HCDR1, HCDR2, and a HCDR3 as set forth for Clone 5 in MAdCAM Antibody Table 2. In some embodiments, the variable heavy chain has a HCDR1, HCDR2, and a HCDR3 as set forth for Clone 6 in MAdCAM Antibody Table 2. In some embodiments, the variable heavy chain has a HCDR1, HCDR2, and a HCDR3 as set forth for Clone 7 in MAdCAM Antibody Table 2. In some embodiments, the variable heavy chain has a HCDR1, HCDR2, and a HCDR3 as set forth for Clone 8 in MAdCAM Antibody Table 2. In some embodiments, the variable heavy chain has a HCDR1, HCDR2, and a HCDR3 as set forth for Clone 9 in MAdCAM Antibody Table 2. In some embodiments, the variable heavy chain has a HCDR1, HCDR2, and a HCDR3 as set forth for Clone 10 in MAdCAM Antibody Table 2. In some embodiments, the variable heavy chain has a HCDR1, HCDR2, and a HCDR3 as set forth for Clone 11 in MAdCAM Antibody Table 2. In some embodiments, the variable heavy chain has a HCDR1, HCDR2, and a HCDR3 as set forth for Clone 12 in MAdCAM Antibody Table 2. In some embodiments, the variable heavy chain has a HCDR1, HCDR2, and a HCDR3 as set forth for Clone 13 in MAdCAM Antibody Table 2. In some embodiments, the variable heavy chain has a HCDR1, HCDR2, and a HCDR3 as set forth for Clone 14 in MAdCAM Antibody Table 2. In some embodiments, the variable heavy chain has a HCDR1, HCDR2, and a HCDR3 as set forth for Clone 15 in MAdCAM Antibody Table 2. In some embodiments, the variable heavy chain has a HCDR1, HCDR2, and a HCDR3 as set forth for Clone 16 in MAdCAM Antibody Table 2. In some embodiments, the variable heavy chain has a HCDR1, HCDR2, and a HCDR3 as set forth for Clone 17 in MAdCAM Antibody Table 2. In some embodiments, the variable heavy chain has a HCDR1, HCDR2, and a HCDR3 as set forth for Clone 1 in MAdCAM Antibody Table 2. In some embodiments, the variable heavy chain has a HCDR1, HCDR2, and a HCDR3 as set forth for Clone 18 in MAdCAM Antibody Table 2. In some embodiments, the variable heavy chain has a HCDR1, HCDR2, and a HCDR3 as set forth for Clone 19 in MAdCAM Antibody Table 2. In some embodiments, the variable heavy chain has a HCDR1, HCDR2, and a HCDR3 as set forth for Clone 20 in MAdCAM Antibody Table 2. In some embodiments, the variable heavy chain has a HCDR1, HCDR2, and a HCDR3 as set forth for Clone 21 in MAdCAM Antibody Table 2. In some embodiments, the variable heavy chain has a HCDR1, HCDR2, and a HCDR3 as set forth for Clone 22 in MAdCAM Antibody Table 2. In some embodiments, the variable heavy chain has a HCDR1, HCDR2, and a HCDR3 as set forth for Clone 23 in MAdCAM Antibody Table 2. In some embodiments, the variable heavy chain has a HCDR1, HCDR2, and a HCDR3 as set forth for Clone 24 in MAdCAM Antibody Table 2. In some embodiments, the variable heavy chain has a HCDR1, HCDR2, and a HCDR3 as set forth for Clone 25 in MAdCAM Antibody Table 2. In some embodiments, the variable heavy chain has a HCDR1, HCDR2, and a HCDR3 as set forth for Clone 26 in MAdCAM Antibody Table 2. In some embodiments, the variable heavy chain has a HCDR1, HCDR2, and a HCDR3 as set forth for Clone 27 in MAdCAM Antibody Table 2. In some embodiments, the variable heavy chain has a HCDR1, HCDR2, and a HCDR3 as set forth for Clone 28 in MAdCAM Antibody Table 2. In some embodiments, the variable heavy chain has a HCDR1, HCDR2, and a HCDR3 as set forth for Clone 29 in MAdCAM Antibody Table 2. In some embodiments, the variable heavy chain has a HCDR1, HCDR2, and a HCDR3 as set forth for Clone 30 in MAdCAM Antibody Table 2. In some embodiments, the variable heavy chain has a HCDR1, HCDR2, and a HCDR3 as set forth for Clone 31 in MAdCAM Antibody Table 2. In some embodiments, the variable heavy chain has a HCDR1, HCDR2, and a HCDR3 as set forth for Clone 32 in MAdCAM Antibody Table 2. In some embodiments, the variable heavy chain has a HCDR1, HCDR2, and a HCDR3 as set forth for Clone 33 in MAdCAM Antibody Table 2. In some embodiments, the variable heavy chain has a HCDR1, HCDR2, and a HCDR3 as set forth for Clone 34 in MAdCAM Antibody Table 2. In some embodiments, the variable heavy chain has a HCDR1, HCDR2, and a HCDR3 as set forth for Clone 35 in MAdCAM Antibody Table 2. In some embodiments, the variable heavy chain has a HCDR1, HCDR2, and a HCDR3 as set forth for Clone 36 in MAdCAM Antibody Table 2. In some embodiments, the variable heavy chain has a HCDR1, HCDR2, and a HCDR3 as set forth for Clone 37 in MAdCAM Antibody Table 2. In some embodiments, the variable heavy chain has a HCDR1, HCDR2, and a HCDR3 as set forth for Clone 38 in MAdCAM Antibody Table 2. In some embodiments, the variable heavy chain has a HCDR1, HCDR2, and a HCDR3 as set forth for Clone 39 in MAdCAM Antibody Table 2. In some embodiments, the variable heavy chain has a HCDR1, HCDR2, and a HCDR3 as set forth for Clone 40 in MAdCAM Antibody Table 2. In some embodiments, the variable heavy chain has a HCDR1, HCDR2, and a HCDR3 as set forth for Clone 41 in MAdCAM Antibody Table 2. In some embodiments, the variable heavy chain has a HCDR1, HCDR2, and a HCDR3 as set forth for Clone 42 in MAdCAM Antibody Table 2. In some embodiments, the variable heavy chain has a HCDR1, HCDR2, and a HCDR3 as set forth for Clone 43 in MAdCAM Antibody Table 2. In some embodiments, the variable heavy chain has a HCDR1, HCDR2, and a HCDR3 as set forth for Clone 44 in MAdCAM Antibody Table 2. In some embodiments, the variable heavy chain has a HCDR1, HCDR2, and a HCDR3 as set forth for Clone 45 in MAdCAM Antibody Table 2. In some embodiments, the variable heavy chain has a HCDR1, HCDR2, and a HCDR3 as set forth for Clone 46 in MAdCAM Antibody Table 2. In some embodiments, the variable heavy chain has a HCDR1, HCDR2, and a HCDR3 as set forth for Clone 47 in MAdCAM Antibody Table 2. In some embodiments, the variable heavy chain has a HCDR1, HCDR2, and a HCDR3 as set forth for Clone 48 in MAdCAM Antibody Table 2. In some embodiments, the variable heavy chain has a HCDR1, HCDR2, and a HCDR3 as set forth for Clone 49 in MAdCAM Antibody Table 2. In some embodiments, the variable heavy chain has a HCDR1, HCDR2, and a HCDR3 as set forth for Clone 50 in MAdCAM Antibody Table 2. In some embodiments, the variable heavy chain has a HCDR1, HCDR2, and a HCDR3 as set forth for Clone 51 in MAdCAM Antibody Table 2. In some embodiments, the variable heavy chain has a HCDR1, HCDR2, and a HCDR3 as set forth for Clone 52 in MAdCAM Antibody Table 2. In some embodiments, the variable heavy chain has a HCDR1, HCDR2, and a HCDR3 as set forth for Clone 53 in MAdCAM Antibody Table 2. In some embodiments, the variable heavy chain has a HCDR1, HCDR2, and a HCDR3 as set forth for Clone 54 in MAdCAM Antibody Table 2. In some embodiments, the variable heavy chain has a HCDR1, HCDR2, and a HCDR3 as set forth for Clone 55 in MAdCAM Antibody Table 2. In some embodiments, the variable heavy chain has a HCDR1, HCDR2, and a HCDR3 as set forth for Clone 56 in MAdCAM Antibody Table 2. In some embodiments, the variable heavy chain has a HCDR1, HCDR2, and a HCDR3 as set forth for Clone 57 in MAdCAM Antibody Table 2. In some embodiments, the variable heavy chain has a HCDR1, HCDR2, and a HCDR3 as set forth for Clone 58 in MAdCAM Antibody Table 2. In some embodiments, the variable heavy chain has a HCDR1, HCDR2, and a HCDR3 as set forth for Clone 59 in MAdCAM Antibody Table 2. In some embodiments, the variable heavy chain has a HCDR1, HCDR2, and a HCDR3 as set forth for Clone 60 in MAdCAM Antibody Table 2. In some embodiments, the variable heavy chain has a HCDR1, HCDR2, and a HCDR3 as set forth for Clone 61 in MAdCAM Antibody Table 2. In some embodiments, the variable heavy chain has a HCDR1, HCDR2, and a HCDR3 as set forth for Clone 62 in MAdCAM Antibody Table 2. In some embodiments, the variable heavy chain has a HCDR1, HCDR2, and a HCDR3 as set forth for Clone 63 in MAdCAM Antibody Table 2. In some embodiments, the variable heavy chain has a HCDR1, HCDR2, and a HCDR3 as set forth for Clone 64 in MAdCAM Antibody Table 2. In some embodiments, the variable heavy chain has a HCDR1, HCDR2, and a HCDR3 as set forth for Clone 65 in MAdCAM Antibody Table 2. In some embodiments, the variable heavy chain has a HCDR1, HCDR2, and a HCDR3 as set forth for Clone 66 in MAdCAM Antibody Table 2. In some embodiments, the variable heavy chain has a HCDR1, HCDR2, and a HCDR3 as set forth for Clone 67 in MAdCAM Antibody Table 2. In some embodiments, the variable heavy chain has a HCDR1, HCDR2, and a HCDR3 as set forth for Clone 68 in MAdCAM Antibody Table 2. In some embodiments, the variable heavy chain has a HCDR1, HCDR2, and a HCDR3 as set forth for Clone 69 in MAdCAM Antibody Table 2. In some embodiments, the variable heavy chain has a HCDR1, HCDR2, and a HCDR3 as set forth for Clone 70 in MAdCAM Antibody Table 2. In some embodiments, the variable heavy chain has a HCDR1, HCDR2, and a HCDR3 as set forth for Clone 71 in MAdCAM Antibody Table 2. In some embodiments, the variable heavy chain has a HCDR1, HCDR2, and a HCDR3 as set forth for Clone 72 in MAdCAM Antibody Table 2. In some embodiments, the variable heavy chain has a HCDR1, HCDR2, and a HCDR3 as set forth for Clone 73 in MAdCAM Antibody Table 2. In some embodiments, the variable heavy chain has a HCDR1, HCDR2, and a HCDR3 as set forth for Clone 74 in MAdCAM Antibody Table 2. In some embodiments, the variable heavy chain has a HCDR1, HCDR2, and a HCDR3 as set forth for Clone 75 in MAdCAM Antibody Table 2. In some embodiments, the variable heavy chain has a HCDR1, HCDR2, and a HCDR3 as set forth for Clone 76 in MAdCAM Antibody Table 2. In some embodiments, the variable heavy chain has a HCDR1, HCDR2, and a HCDR3 as set forth for Clone 77 in MAdCAM Antibody Table 2. In some embodiments, the variable heavy chain has a HCDR1, HCDR2, and a HCDR3 as set forth for Clone 78 in MAdCAM Antibody Table 2. In some embodiments, the variable heavy chain has a HCDR1, HCDR2, and a HCDR3 as set forth for Clone 79 in MAdCAM Antibody Table 2. In some embodiments, the variable heavy chain has a HCDR1, HCDR2, and a HCDR3 as set forth for Clone 80 in MAdCAM Antibody Table 2. In some embodiments, the variable heavy chain has a HCDR1, HCDR2, and a HCDR3 as set forth for Clone 81 in MAdCAM Antibody Table 2. In some embodiments, the variable heavy chain has a HCDR1, HCDR2, and a HCDR3 as set forth for Clone 82 in MAdCAM Antibody Table 2. In some embodiments, the variable heavy chain has a HCDR1, HCDR2, and a HCDR3 as set forth for Clone 83 in MAdCAM Antibody Table 2. In some embodiments, the variable heavy chain has a HCDR1, HCDR2, and a HCDR3 as set forth for Clone 84 in MAdCAM Antibody Table 2.

[0487] In some embodiments, the variable heavy chain has a LCDR1, LCDR2, and a LCDR3 as set forth for Clone 1 in MAdCAM Antibody Table 1. In some embodiments, the variable heavy chain has a LCDR1, LCDR2, and a LCDR3 as set forth for Clone 2 in MAdCAM Antibody Table 1. In some embodiments, the variable heavy chain has a LCDR1, LCDR2, and a LCDR3 as set forth for Clone 3 in MAdCAM Antibody Table 1. In some embodiments, the variable heavy chain has a LCDR1, LCDR2, and a LCDR3 as set forth for Clone 4 in MAdCAM Antibody Table 1. In some embodiments, the variable heavy chain has a LCDR1, LCDR2, and a LCDR3 as set forth for Clone 5 in MAdCAM Antibody Table 1. In some embodiments, the variable heavy chain has a LCDR1, LCDR2, and a LCDR3 as set forth for Clone 6 in MAdCAM Antibody Table 1. In some embodiments, the variable heavy chain has a LCDR1, LCDR2, and a LCDR3 as set forth for Clone 7 in MAdCAM Antibody Table 1. In some embodiments, the variable heavy chain has a LCDR1, LCDR2, and a LCDR3 as set forth for Clone 8 in MAdCAM Antibody Table 1. In some embodiments, the variable heavy chain has a LCDR1, LCDR2, and a LCDR3 as set forth for Clone 9 in MAdCAM Antibody Table 1. In some embodiments, the variable heavy chain has a LCDR1, LCDR2, and a LCDR3 as set forth for Clone 10 in MAdCAM Antibody Table 1. In some embodiments, the variable heavy chain has a LCDR1, LCDR2, and a LCDR3 as set forth for Clone 11 in MAdCAM Antibody Table 1. In some embodiments, the variable heavy chain has a LCDR1, LCDR2, and a LCDR3 as set forth for Clone 12 in MAdCAM Antibody Table 1. In some embodiments, the variable heavy chain has a LCDR1, LCDR2, and a LCDR3 as set forth for Clone 13 in MAdCAM Antibody Table 1. In some embodiments, the variable heavy chain has a LCDR1, LCDR2, and a LCDR3 as set forth for Clone 14 in MAdCAM Antibody Table 1. In some embodiments, the variable heavy chain has a LCDR1, LCDR2, and a LCDR3 as set forth for Clone 15 in MAdCAM Antibody Table 1. In some embodiments, the variable heavy chain has a LCDR1, LCDR2, and a LCDR3 as set forth for Clone 16 in MAdCAM Antibody Table 1. In some embodiments, the variable heavy chain has a LCDR1, LCDR2, and a LCDR3 as set forth for Clone 17 in MAdCAM Antibody Table 1. In some embodiments, the variable heavy chain has a LCDR1, LCDR2, and a LCDR3 as set forth for Clone 1 in MAdCAM Antibody Table 1. In some embodiments, the variable heavy chain has a LCDR1, LCDR2, and a LCDR3 as set forth for Clone 18 in MAdCAM Antibody Table 1. In some embodiments, the variable heavy chain has a LCDR1, LCDR2, and a LCDR3 as set forth for Clone 19 in MAdCAM Antibody Table 1. In some embodiments, the variable heavy chain has a LCDR1, LCDR2, and a LCDR3 as set forth for Clone 20 in MAdCAM Antibody Table 1. In some embodiments, the variable heavy chain has a LCDR1, LCDR2, and a LCDR3 as set forth for Clone 21 in MAdCAM Antibody Table 1. In some embodiments, the variable heavy chain has a LCDR1, LCDR2, and a LCDR3 as set forth for Clone 22 in MAdCAM Antibody Table 1. In some embodiments, the variable heavy chain has a LCDR1, LCDR2, and a LCDR3 as set forth for Clone 23 in MAdCAM Antibody Table 1. In some embodiments, the variable heavy chain has a LCDR1, LCDR2, and a LCDR3 as set forth for Clone 24 in MAdCAM Antibody Table 1. In some embodiments, the variable heavy chain has a LCDR1, LCDR2, and a LCDR3 as set forth for Clone 25 in MAdCAM Antibody Table 1. In some embodiments, the variable heavy chain has a LCDR1, LCDR2, and a LCDR3 as set forth for Clone 26 in MAdCAM Antibody Table 1. In some embodiments, the variable heavy chain has a LCDR1, LCDR2, and a LCDR3 as set forth for Clone 27 in MAdCAM Antibody Table 1. In some embodiments, the variable heavy chain has a LCDR1, LCDR2, and a LCDR3 as set forth for Clone 28 in MAdCAM Antibody Table 1. In some embodiments, the variable heavy chain has a LCDR1, LCDR2, and a LCDR3 as set forth for Clone 29 in MAdCAM Antibody Table 1. In some embodiments, the variable heavy chain has a LCDR1, LCDR2, and a LCDR3 as set forth for Clone 30 in MAdCAM Antibody Table 1. In some embodiments, the variable heavy chain has a LCDR1, LCDR2, and a LCDR3 as set forth for Clone 31 in MAdCAM Antibody Table 1. In some embodiments, the variable heavy chain has a LCDR1, LCDR2, and a LCDR3 as set forth for Clone 32 in MAdCAM Antibody Table 1. In some embodiments, the variable heavy chain has a LCDR1, LCDR2, and a LCDR3 as set forth for Clone 33 in MAdCAM Antibody Table 1. In some embodiments, the variable heavy chain has a LCDR1, LCDR2, and a LCDR3 as set forth for Clone 34 in MAdCAM Antibody Table 1. In some embodiments, the variable heavy chain has a LCDR1, LCDR2, and a LCDR3 as set forth for Clone 35 in MAdCAM Antibody Table 1. In some embodiments, the variable heavy chain has a LCDR1, LCDR2, and a LCDR3 as set forth for Clone 36 in MAdCAM Antibody Table 1. In some embodiments, the variable heavy chain has a LCDR1, LCDR2, and a LCDR3 as set forth for Clone 37 in MAdCAM Antibody Table 1. In some embodiments, the variable heavy chain has a LCDR1, LCDR2, and a LCDR3 as set forth for Clone 38 in MAdCAM Antibody Table 1. In some embodiments, the variable heavy chain has a LCDR1, LCDR2, and a LCDR3 as set forth for Clone 39 in MAdCAM Antibody Table 1. In some embodiments, the variable heavy chain has a LCDR1, LCDR2, and a LCDR3 as set forth for Clone 40 in MAdCAM Antibody Table 1. In some embodiments, the variable heavy chain has a LCDR1, LCDR2, and a LCDR3 as set forth for Clone 41 in MAdCAM Antibody Table 1. In some embodiments, the variable heavy chain has a LCDR1, LCDR2, and a LCDR3 as set forth for Clone 42 in MAdCAM Antibody Table 1. In some embodiments, the variable heavy chain has a LCDR1, LCDR2, and a LCDR3 as set forth for Clone 43 in MAdCAM Antibody Table 1. In some embodiments, the variable heavy chain has a LCDR1, LCDR2, and a LCDR3 as set forth for Clone 44 in MAdCAM Antibody Table 1. In some embodiments, the variable heavy chain has a LCDR1, LCDR2, and a LCDR3 as set forth for Clone 45 in MAdCAM Antibody Table 1. In some embodiments, the variable heavy chain has a LCDR1, LCDR2, and a LCDR3 as set forth for Clone 46 in MAdCAM Antibody Table 1. In some embodiments, the variable heavy chain has a LCDR1, LCDR2, and a LCDR3 as set forth for Clone 47 in MAdCAM Antibody Table 1. In some embodiments, the variable heavy chain has a LCDR1, LCDR2, and a LCDR3 as set forth for Clone 48 in MAdCAM Antibody Table 1. In some embodiments, the variable heavy chain has a LCDR1, LCDR2, and a LCDR3 as set forth for Clone 49 in MAdCAM Antibody Table 1. In some embodiments, the variable heavy chain has a LCDR1, LCDR2, and a LCDR3 as set forth for Clone 50 in MAdCAM Antibody Table 1. In some embodiments, the variable heavy chain has a LCDR1, LCDR2, and a LCDR3 as set forth for Clone 51 in MAdCAM Antibody Table 1. In some embodiments, the variable heavy chain has a LCDR1, LCDR2, and a LCDR3 as set forth for Clone 52 in MAdCAM Antibody Table 1. In some embodiments, the variable heavy chain has a LCDR1, LCDR2, and a LCDR3 as set forth for Clone 53 in MAdCAM Antibody Table 1. In some embodiments, the variable heavy chain has a LCDR1, LCDR2, and a LCDR3 as set forth for Clone 54 in MAdCAM Antibody Table 1. In some embodiments, the variable heavy chain has a LCDR1, LCDR2, and a LCDR3 as set forth for Clone 55 in MAdCAM Antibody Table 1. In some embodiments, the variable heavy chain has a LCDR1, LCDR2, and a LCDR3 as set forth for Clone 56 in MAdCAM Antibody Table 1. In some embodiments, the variable heavy chain has a LCDR1, LCDR2, and a LCDR3 as set forth for Clone 57 in MAdCAM Antibody Table 1. In some embodiments, the variable heavy chain has a LCDR1, LCDR2, and a LCDR3 as set forth for Clone 58 in MAdCAM Antibody Table 1. In some embodiments, the variable heavy chain has a LCDR1, LCDR2, and a LCDR3 as set forth for Clone 59 in MAdCAM Antibody Table 1. In some embodiments, the variable heavy chain has a LCDR1, LCDR2, and a LCDR3 as set forth for Clone 60 in MAdCAM Antibody Table 1. In some embodiments, the variable heavy chain has a LCDR1, LCDR2, and a LCDR3 as set forth for Clone 61 in MAdCAM Antibody Table 1. In some embodiments, the variable heavy chain has a LCDR1, LCDR2, and a LCDR3 as set forth for Clone 62 in MAdCAM Antibody Table 1. In some embodiments, the variable heavy chain has a LCDR1, LCDR2, and a LCDR3 as set forth for Clone 63 in MAdCAM Antibody Table 1. In some embodiments, the variable heavy chain has a LCDR1, LCDR2, and a LCDR3 as set forth for Clone 64 in MAdCAM Antibody Table 1. In some embodiments, the variable heavy chain has a LCDR1, LCDR2, and a LCDR3 as set forth for Clone 65 in MAdCAM Antibody Table 1. In some embodiments, the variable heavy chain has a LCDR1, LCDR2, and a LCDR3 as set forth for Clone 66 in MAdCAM Antibody Table 1.

[0488] In some embodiments, the variable heavy chain has a LCDR1, LCDR2, and a LCDR3 as set forth for Clone 1 in MAdCAM Antibody Table 2. In some embodiments, the variable heavy chain has a LCDR1, LCDR2, and a LCDR3 as set forth for Clone 2 in MAdCAM Antibody Table 2. In some embodiments, the variable heavy chain has a LCDR1, LCDR2, and a LCDR3 as set forth for Clone 3 in MAdCAM Antibody Table 2. In some embodiments, the variable heavy chain has a LCDR1, LCDR2, and a LCDR3 as set forth for Clone 4 in MAdCAM Antibody Table 2. In some embodiments, the variable heavy chain has a LCDR1, LCDR2, and a LCDR3 as set forth for Clone 5 in MAdCAM Antibody Table 2. In some embodiments, the variable heavy chain has a LCDR1, LCDR2, and a LCDR3 as set forth for Clone 6 in MAdCAM Antibody Table 2. In some embodiments, the variable heavy chain has a LCDR1, LCDR2, and a LCDR3 as set forth for Clone 7 in MAdCAM Antibody Table 2. In some embodiments, the variable heavy chain has a LCDR1, LCDR2, and a LCDR3 as set forth for Clone 8 in MAdCAM Antibody Table 2. In some embodiments, the variable heavy chain has a LCDR1, LCDR2, and a LCDR3 as set forth for Clone 9 in MAdCAM Antibody Table 2. In some embodiments, the variable heavy chain has a LCDR1, LCDR2, and a LCDR3 as set forth for Clone 10 in MAdCAM Antibody Table 2. In some embodiments, the variable heavy chain has a LCDR1, LCDR2, and a LCDR3 as set forth for Clone 11 in MAdCAM Antibody Table 2. In some embodiments, the variable heavy chain has a LCDR1, LCDR2, and a LCDR3 as set forth for Clone 12 in MAdCAM Antibody Table 2. In some embodiments, the variable heavy chain has a LCDR1, LCDR2, and a LCDR3 as set forth for Clone 13 in MAdCAM Antibody Table 2. In some embodiments, the variable heavy chain has a LCDR1, LCDR2, and a LCDR3 as set forth for Clone 14 in MAdCAM Antibody Table 2. In some embodiments, the variable heavy chain has a LCDR1, LCDR2, and a LCDR3 as set forth for Clone 15 in MAdCAM Antibody Table 2. In some embodiments, the variable heavy chain has a LCDR1, LCDR2, and a LCDR3 as set forth for Clone 16 in MAdCAM Antibody Table 2. In some embodiments, the variable heavy chain has a LCDR1, LCDR2, and a LCDR3 as set forth for Clone 17 in MAdCAM Antibody Table 2. In some embodiments, the variable heavy chain has a LCDR1, LCDR2, and a LCDR3 as set forth for Clone 1 in MAdCAM Antibody Table 2. In some embodiments, the variable heavy chain has a LCDR1, LCDR2, and a LCDR3 as set forth for Clone 18 in MAdCAM Antibody Table 2. In some embodiments, the variable heavy chain has a LCDR1, LCDR2, and a LCDR3 as set forth for Clone 19 in MAdCAM Antibody Table 2. In some embodiments, the variable heavy chain has a LCDR1, LCDR2, and a LCDR3 as set forth for Clone 20 in MAdCAM Antibody Table 2. In some embodiments, the variable heavy chain has a LCDR1, LCDR2, and a LCDR3 as set forth for Clone 21 in MAdCAM Antibody Table 2. In some embodiments, the variable heavy chain has a LCDR1, LCDR2, and a LCDR3 as set forth for Clone 22 in MAdCAM Antibody Table 2. In some embodiments, the variable heavy chain has a LCDR1, LCDR2, and a LCDR3 as set forth for Clone 23 in MAdCAM Antibody Table 2. In some embodiments, the variable heavy chain has a LCDR1, LCDR2, and a LCDR3 as set forth for Clone 24 in MAdCAM Antibody Table 2. In some embodiments, the variable heavy chain has a LCDR1, LCDR2, and a LCDR3 as set forth for Clone 25 in MAdCAM Antibody Table 2. In some embodiments, the variable heavy chain has a LCDR1, LCDR2, and a LCDR3 as set forth for Clone 26 in MAdCAM Antibody Table 2. In some embodiments, the variable heavy chain has a LCDR1, LCDR2, and a LCDR3 as set forth for Clone 27 in MAdCAM Antibody Table 2. In some embodiments, the variable heavy chain has a LCDR1, LCDR2, and a LCDR3 as set forth for Clone 28 in MAdCAM Antibody Table 2. In some embodiments, the variable heavy chain has a LCDR1, LCDR2, and a LCDR3 as set forth for Clone 29 in MAdCAM Antibody Table 2. In some embodiments, the variable heavy chain has a LCDR1, LCDR2, and a LCDR3 as set forth for Clone 30 in MAdCAM Antibody Table 2. In some embodiments, the variable heavy chain has a LCDR1, LCDR2, and a LCDR3 as set forth for Clone 31 in MAdCAM Antibody Table 2. In some embodiments, the variable heavy chain has a LCDR1, LCDR2, and a LCDR3 as set forth for Clone 32 in MAdCAM Antibody Table 2. In some embodiments, the variable heavy chain has a LCDR1, LCDR2, and a LCDR3 as set forth for Clone 33 in MAdCAM Antibody Table 2. In some embodiments, the variable heavy chain has a LCDR1, LCDR2, and a LCDR3 as set forth for Clone 34 in MAdCAM Antibody Table 2. In some embodiments, the variable heavy chain has a LCDR1, LCDR2, and a LCDR3 as set forth for Clone 35 in MAdCAM Antibody Table 2. In some embodiments, the variable heavy chain has a LCDR1, LCDR2, and a LCDR3 as set forth for Clone 36 in MAdCAM Antibody Table 2. In some embodiments, the variable heavy chain has a LCDR1, LCDR2, and a LCDR3 as set forth for Clone 37 in MAdCAM Antibody Table 2. In some embodiments, the variable heavy chain has a LCDR1, LCDR2, and a LCDR3 as set forth for Clone 38 in MAdCAM Antibody Table 2. In some embodiments, the variable heavy chain has a LCDR1, LCDR2, and a LCDR3 as set forth for Clone 39 in MAdCAM Antibody Table 2. In some embodiments, the variable heavy chain has a LCDR1, LCDR2, and a LCDR3 as set forth for Clone 40 in MAdCAM Antibody Table 2. In some embodiments, the variable heavy chain has a LCDR1, LCDR2, and a LCDR3 as set forth for Clone 41 in MAdCAM Antibody Table 2. In some embodiments, the variable heavy chain has a LCDR1, LCDR2, and a LCDR3 as set forth for Clone 42 in MAdCAM Antibody Table 2. In some embodiments, the variable heavy chain has a LCDR1, LCDR2, and a LCDR3 as set forth for Clone 43 in MAdCAM Antibody Table 2. In some embodiments, the variable heavy chain has a LCDR1, LCDR2, and a LCDR3 as set forth for Clone 44 in MAdCAM Antibody Table 2. In some embodiments, the variable heavy chain has a LCDR1, LCDR2, and a LCDR3 as set forth for Clone 45 in MAdCAM Antibody Table 2. In some embodiments, the variable heavy chain has a LCDR1, LCDR2, and a LCDR3 as set forth for Clone 46 in MAdCAM Antibody Table 2. In some embodiments, the variable heavy chain has a LCDR1, LCDR2, and a LCDR3 as set forth for Clone 47 in MAdCAM Antibody Table 2. In some embodiments, the variable heavy chain has a LCDR1, LCDR2, and a LCDR3 as set forth for Clone 48 in MAdCAM Antibody Table 2. In some embodiments, the variable heavy chain has a LCDR1, LCDR2, and a LCDR3 as set forth for Clone 49 in MAdCAM Antibody Table 2. In some embodiments, the variable heavy chain has a LCDR1, LCDR2, and a LCDR3 as set forth for Clone 50 in MAdCAM Antibody Table 2. In some embodiments, the variable heavy chain has a LCDR1, LCDR2, and a LCDR3 as set forth for Clone 51 in MAdCAM Antibody Table 2. In some embodiments, the variable heavy chain has a LCDR1, LCDR2, and a LCDR3 as set forth for Clone 52 in MAdCAM Antibody Table 2. In some embodiments, the variable heavy chain has a LCDR1, LCDR2, and a LCDR3 as set forth for Clone 53 in MAdCAM Antibody Table 2. In some embodiments, the variable heavy chain has a LCDR1, LCDR2, and a LCDR3 as set forth for Clone 54 in MAdCAM Antibody Table 2. In some embodiments, the variable heavy chain has a LCDR1, LCDR2, and a LCDR3 as set forth for Clone 55 in MAdCAM Antibody Table 2. In some embodiments, the variable heavy chain has a LCDR1, LCDR2, and a LCDR3 as set forth for Clone 56 in MAdCAM Antibody Table 2. In some embodiments, the variable heavy chain has a LCDR1, LCDR2, and a LCDR3 as set forth for Clone 57 in MAdCAM Antibody Table 2. In some embodiments, the variable heavy chain has a LCDR1, LCDR2, and a LCDR3 as set forth for Clone 58 in MAdCAM Antibody Table 2. In some embodiments, the variable heavy chain has a LCDR1, LCDR2, and a LCDR3 as set forth for Clone 59 in MAdCAM Antibody Table 2. In some embodiments, the variable heavy chain has a LCDR1, LCDR2, and a LCDR3 as set forth for Clone 60 in MAdCAM Antibody Table 2. In some embodiments, the variable heavy chain has a LCDR1, LCDR2, and a LCDR3 as set forth for Clone 61 in MAdCAM Antibody Table 2. In some embodiments, the variable heavy chain has a LCDR1, LCDR2, and a LCDR3 as set forth for Clone 62 in MAdCAM Antibody Table 2. In some embodiments, the variable heavy chain has a LCDR1, LCDR2, and a LCDR3 as set forth for Clone 63 in MAdCAM Antibody Table 2. In some embodiments, the variable heavy chain has a LCDR1, LCDR2, and a LCDR3 as set forth for Clone 64 in MAdCAM Antibody Table 2. In some embodiments, the variable heavy chain has a LCDR1, LCDR2, and a LCDR3 as set forth for Clone 65 in MAdCAM Antibody Table 2. In some embodiments, the variable heavy chain has a LCDR1, LCDR2, and a LCDR3 as set forth for Clone 66 in MAdCAM Antibody Table 2. In some embodiments, the variable heavy chain has a LCDR1, LCDR2, and a LCDR3 as set forth for Clone 67 in MAdCAM Antibody Table 2. In some embodiments, the variable heavy chain has a LCDR1, LCDR2, and a LCDR3 as set forth for Clone 68 in MAdCAM Antibody Table 2. In some embodiments, the variable heavy chain has a LCDR1, LCDR2, and a LCDR3 as set forth for Clone 69 in MAdCAM Antibody Table 2. In some embodiments, the variable heavy chain has a LCDR1, LCDR2, and a LCDR3 as set forth for Clone 70 in MAdCAM Antibody Table 2. In some embodiments, the variable heavy chain has a LCDR1, LCDR2, and a LCDR3 as set forth for Clone 71 in MAdCAM Antibody Table 2. In some embodiments, the variable heavy chain has a LCDR1, LCDR2, and a LCDR3 as set forth for Clone 72 in MAdCAM Antibody Table 2. In some embodiments, the variable heavy chain has a LCDR1, LCDR2, and a LCDR3 as set forth for Clone 73 in MAdCAM Antibody Table 2. In some embodiments, the variable heavy chain has a LCDR1, LCDR2, and a LCDR3 as set forth for Clone 74 in MAdCAM Antibody Table 2. In some embodiments, the variable heavy chain has a LCDR1, LCDR2, and a LCDR3 as set forth for Clone 75 in MAdCAM Antibody Table 2. In some embodiments, the variable heavy chain has a LCDR1, LCDR2, and a LCDR3 as set forth for Clone 76 in MAdCAM Antibody Table 2. In some embodiments, the variable heavy chain has a LCDR1, LCDR2, and a LCDR3 as set forth for Clone 77 in MAdCAM Antibody Table 2. In some embodiments, the variable heavy chain has a LCDR1, LCDR2, and a LCDR3 as set forth for Clone 78 in MAdCAM Antibody Table 2. In some embodiments, the variable heavy chain has a LCDR1, LCDR2, and a LCDR3 as set forth for Clone 79 in MAdCAM Antibody Table 2. In some embodiments, the variable heavy chain has a LCDR1, LCDR2, and a LCDR3 as set forth for Clone 80 in MAdCAM Antibody Table 2. In some embodiments, the variable heavy chain has a LCDR1, LCDR2, and a LCDR3 as set forth for Clone 81 in MAdCAM Antibody Table 2. In some embodiments, the variable heavy chain has a LCDR1, LCDR2, and a LCDR3 as set forth for Clone 82 in MAdCAM Antibody Table 2. In some embodiments, the variable heavy chain has a LCDR1, LCDR2, and a LCDR3 as set forth for Clone 83 in MAdCAM Antibody Table 2. In some embodiments, the variable heavy chain has a LCDR1, LCDR2, and a LCDR3 as set forth for Clone 84 in MAdCAM Antibody Table 2.

[0489] In some embodiments, the CDRS are swapped for one another. For example, the HCDR1 of clone 1 can be substituted for the HCDR1 of clone 10, or vice versa. This CDR swapping can be done for any of the HCDRs of the clones provided herein (e.g., HCDR1 for HCDR1; HCDR2 for HCDR2; or HCDR3 for HCDR3) or the LCDRs (e.g., LCDR1 for LCDR1; LCDR2 for LCDR2; or LCDR3 for LCDR3). Therefore, in some embodiments, the antibody comprises a HCDR1 as set forth in any of Clones 1-66 of MAdCAM Antibody Table 1 or Clones 1-84 of MAdCAM Antibody Table 2, a HCDR2 as set forth in any of Clones 1-66 of MAdCAM Antibody Table 1 or Clones 1-84 of MAdCAM Antibody Table 2, a HCDR3 as set forth in any of Clones 1-66 of MAdCAM Antibody Table 1 or Clones 1-84 of MAdCAM Antibody Table 2, a LCDR1 as set forth in any of Clones 1-66 of MAdCAM Antibody Table 1 or Clones 1-84 of MAdCAM Antibody Table 2, a LCDR2 as set forth in any of Clones 1-66 of MAdCAM Antibody Table 1 or Clones 1-84 of MAdCAM Antibody Table 2, a LCDR3 as set forth in any of Clones 1-66 of MAdCAM Antibody Table 1 or Clones 1-84 of MAdCAM Antibody Table 2, or a variant of any of the foregoing.

[0490] In some embodiments, the MadCAM Antibody is a scFV format as shown in clones 6, 59, or 63. The linker as shown in those sequences is 20 amino acid residues in length, but could also be 5, 10, or 15 amino acid residues in length. In some embodiments, the linker the links the VH and VL(or VK) sequences of the antibody is a glycine/serine linker, which can be a sequence of GGGGSGGGGSGGGGSGGGGS (SEQ ID NO: 22) or GGGGSGGGGSGGGGS (SEQ ID NO: 30). This is simply a non-limiting example and the linker can have varying number of GGGGS (SEQ ID NO: 23) or GGGGA repeats (SEQ ID NO: 29). In some embodiments, the linker comprises 1, 2, 3, 4, 5, 6, 7, 8, 9, or 10 of the GGGGS (SEQ ID NO: 23) or GGGGA repeats (SEQ ID NO: 29) repeats. Thus, the linkers shown in MAdCAM Antibody Table 1 are non-limiting examples and can be substituted with any other linkers, such as those provided for herein.

[0491] In some embodiments, the polypeptide comprises the formula of:

APTSSSTKKTQLQLEHLLLDLQMILNGINNYKNPKLTRMLTFKFYMPK
KATELKHLQCLEEELKPLEEALNLAPSKNFHLRPRDLISDINVIVLEL
KGSETTFMCEYADETATIVEFINRWITFSQSIISTLT-Linker1-DK
THTCPPCPAPEAAGAPSVFLFPPKPKDTLMISRTPEVTCVVVDVSHED
PEVKFNWYVDGVEVHNAKTKPREEQYNSTYRVVSVLTVLHQDWLNGKE
YKCKVSNKALPAPIEKTISKAKGQPREPQVYTLPPSREEMTKNQVSLT
CLVKGFYPSDIAVEWESNGQPENNYKTTPPVLDSDGSFFLYSKLTVDK
SRWQQGNVFSCSVMHEALHNHYTQKSLSLSPG-Linker2-Ab,

wherein Linker 1, Linker2, and Ab are as provided herein. In some embodiments, Linker 1 is GGGGSGGGGSGGGGS (SEQ ID NO: 30) or GGGGSGGGGSGGGGSGGGGS (SEQ ID NO: 22). In some embodiments, Linker 2 is GGGGS (SEQ ID NO: 23). In some embodiments, Linker 2 is GGGGSGGGGS (SEQ ID NO: 792). In some embodiments, Linker 2 is GGGGSGGGGSGGGGS (SEQ ID NO: 30). In some embodiments, Ab is the scFV as set forth in MAdCAM Ab Table 1. In some embodiments, the Ab comprises a sequence of SEQ ID NO: 95. In some embodiments, the Ab comprises a sequence of SEQ ID NO: 364. In some embodiments, the Ab comprises a sequence of SEQ ID NO: 386. In some embodiments, the Ab is a PD-1 Ab. In some embodiments, a PD-1 Ab is the PD-1 Ab as set forth in PD-1 Antibody Table 4. In some embodiments, the Ab comprises a VH and a VK or VL segment. In some embodiments, the VH comprises a sequence as set forth in MAdCAM Antibody Table 2. In some embodiments, the VK comprises a sequence as set forth in MAdCAM Antibody Table 2. In some embodiments, the Ab comprises a VH and a VK as set forth for the clones in MAdCAM Antibody Table 2. In some embodiments, the VH and VK are linked by a linker. In some embodiments, the VH and VK are linked by a peptide linker comprising a peptide of GGGGSGGGGSGGGGSGGGGS (SEQ ID NO: 22). In some embodiments, the VH and VK are linked by a peptide linker comprising a peptide of GGGGS. In some embodiments, the VH and VK are linked by a peptide linker comprising a peptide of GGGGSGGGG (SEQ ID NO: 792). In some embodiments, the VH and VK are linked by a peptide linker comprising a peptide of

(SEQ ID NO: 30)
GGGGSGGGGSGGGGS.

In some embodiments, the Ab comprises a VH of SEQ ID NO: 414 and a VK of SEQ ID NO: 415. In some embodiments, the Ab comprises a VH of SEQ ID NO: 591 and a VK of SEQ ID NO: 592. In some embodiments, the Ab comprises a VH of SEQ ID NO: 599 and a VK of SEQ ID NO: 600.

[0492] In some embodiments, the peptide comprises:

APTSSSTKKTQLQLEHLLLDLQMILNGINNYKNPKLTRMLTFKFYMPK
KATELKHLQCLEEELKPLEEALNLAPSKNFHLRPRDLISDINVIVLEL
KGSETTFMCEYADETATIVEFINRWITFSQSITSTLT-
(GGGGSGGGGSGGGGS or GGGGSGGGGSGGGGSGGGGS)-DKTHTC
PPCPAPEAAGAPSVFLFPPKPKDTLMISRTPEVTCVVVDVSHEDPEVK
FNWYVDGVEVHNAKTKPREEQYNSTYRVVSVLTVLHQDWLNGKEYKCK
VSNKALPAPIEKTISKAKGQPREPQVYTLPPSREEMTKNQVSLTCLVK
GFYPSDIAVEWESNGQPENNYKTTPPVLDSDGSFFLYSKLTVDKSRWQ
QGNVFSCSVMHEALHNHYTQKSLSLSPG-
(GGGGS or GGGGSGGGGS or GGGGSGGGGSGGGGS)-Ab,

wherein Ab is set forth as herein. In some embodiments, the Ab comprises a sequence of SEQ ID NO: 95. In some embodiments, the Ab comprises a sequence of SEQ ID NO: 364. In some embodiments, the Ab comprises a sequence of SEQ ID NO: 386. In some embodiments, the Ab comprises a VH and a VK or VL segment. In some embodiments, the VH comprises a sequence as set forth in MAdCAM Antibody Table 2. In some embodiments, the VK comprises a sequence as set forth in MAdCAM Antibody Table 2. In some embodiments, the Ab comprises a VH and a VK as set forth for the clones in MAdCAM Antibody Table 2. In some embodiments, the VH and VK are linked by a linker. In some embodiments, the VH and VK are linked by a peptide linker comprising a peptide of GGGGSGGGGSGGGGSGGGGS (SEQ ID NO: 22). In some embodiments, the VH and VK are linked by a peptide linker comprising a peptide of GGGGS (SEQ ID NO: 23). In some embodiments, the VH and VK are linked by a peptide linker comprising a peptide of GGGGSGGGGS (SEQ ID NO: 792).
In some embodiments, the Ab comprises a VH of SEQ ID NO: 414 and a VK of SEQ ID NO: 415. In some embodiments, the Ab comprises a VH of SEQ ID NO: 591 and a VK of SEQ ID NO: 592. In some embodiments, the Ab comprises a VH of SEQ ID NO: 599 and a VK of SEQ ID NO: 600. These examples are non-limiting the combinations of VH and VK as shown in MAdCAM Antibody Table 2 are also provided.

[0493] In some embodiments, the therapeutic compound or polypeptide comprises a formula of a anti-PD-1 heavy and light chain, wherein the PD-1 heavy chain is linked to a MAdCAM antibody (scFV), such as those provided herein at the C-terminus of the PD-1 IgG heavy chain. The polypeptide can have the formula of A1-A2-Linker1-A4-Linker2-A5 and A6, wherein A1 is a PD-1 heavy chain, A6 is a PD-1 light chain; A2 is a IgG constant domain (e.g. IgG1 Constant domain), Linker 1 is as provided herein, such as, but not limited to, a glycine/serine linker, which can be a sequence of GGGGSGGGGSGGGGSGGGGS (SEQ ID NO: 22) or GGGGSGGGGSGGGGS (SEQ ID NO: 30), which are simply a non-limiting example and the linker can have varying number of GGGGS (SEQ ID NO: 23) or GGGGA repeats (SEQ ID NO: 29) and in some embodiments, the linker comprises 1, 2, 3, 4, 5, 6, 7, 8, 9, or 10 of the GGGGS (SEQ ID NO: 23) or GGGGA repeats (SEQ ID NO: 29) repeats; A4 is VH domain, such as those set forth in MAdCAM Antibody Table 2; Linker 2 is as provided herein, such as, but not limited to, a glycine/serine linker, which can be a sequence of GGGGSGGGGSGGGGSGGGGS (SEQ ID NO: 22) or GGGGSGGGGSGGGGS (SEQ ID NO: 30), which are simply a non-limiting example and the linker can have varying number of GGGGS (SEQ ID NO: 23) or GGGGA repeats (SEQ ID NO: 29) and in some embodiments, the linker comprises 1, 2, 3, 4, 5, 6, 7, 8, 9, or 10 of the GGGGS (SEQ ID NO: 23) or GGGGA repeats (SEQ ID NO: 29) repeats; and A5 is VK/VL domain, such as those set forth in MAdCAM Antibody Table 2. In some embodiments, Linker 2 is GGGGSGGGGSGGGGS (SEQ ID NO: 30). In some embodiments, the A4-Linker2-A5 is a scFV antibody, such as those set forth in MAdCAM Antibody Table 1. The linkers shown in MAdCAM Antibody Table 1 can be substituted with the linker of GGGGSGGGGSGGGGS (SEQ ID NO: 30). In some embodiments, the A4-Linker2-A5 comprises the HCDR sets (e.g., HCDR1, HCDR2, HCDR3, LCDR1, LCDR2, and LCDR3) sets as set forth in MAdCAM Antibody Table 1 or MAdCAM Antibody Table 2. For the avoidance of doubt, a CDR set refers to the CDRs illustrated for each of the different antibody clones provided for in the tables. In some embodiments, A4 comprises a peptide of SEQ ID NO: 414 and A5 comprises a peptide of SEQ ID NO: 415. In some embodiments, A4 comprises a peptide of SEQ ID NO: 591 and A5 comprises a peptide of SEQ ID NO: 592. In some embodiments, A4 comprises a peptide of SEQ ID NO: 599 and A5 comprises a peptide of SEQ ID NO: 600. These examples are non-limiting the combinations of VH and VK as shown in MAdCAM Antibody Table 2 are also provided.

[0494] In some embodiments, A2 comprises a sequence of

(SEQ ID NO: 44)
ASTKGPSVFPLAPSSKSTSGGTAALGCLVKDYFPEPVTVSWNSGALTS
GVHTFPAVLQSSGLYSLSSVVTVPSSSLGTQTYICNVNHKPSNTKVDK
KVEPKSCDKTHTCPPCPAPEAAGAPSVFLFPPKPKDTLMISRTPEVTC
VVVDVSHEDPEVKFNWYVDGVEVHNAKTKPREEQYNSTYRVVSVLTVL
HQDWLNGKEYKCKVSNKALPAPIEKTISKAKGQPREPQVYTLPPSREE
MTKNQVSLTCLVKGFYPSDIAVEWESNGQPENNYKTTPPVLDSDGSFF
LYSKLTVDKSRWQQGNVFSCSVMHEALHNHYTQKSLSLSPG

[0495] Once expressed the heavy and light chains of the PD-1 antibody bind to one another to form the compound comprising the anti-PD-1 antibody linked to the anti-MAdCAM antibody. The anti-MAdCAM antibody can be any antibody that binds to MAdCAM, such as those provided for herein.

[0496] In some embodiments, a polypeptide is provided, wherein the polypeptide comprises a peptide of the formula PD1VH-ConstantDomain-LinkerA-MAdCAMscFv, wherein the PD is a heavy chain of PD-1 antibody as provided herein, the ConstantDomain is an IgG1 constant domain or other constant domain, Linker A is a G/S or G/A linker, such as those provided herein, and the MAdCAMscFv is of the formula MAdCAMVH-LinkerB-MAdCAMVK, wherein MAdCAMVH is a heavy chain variable domain of MAdCAM Ab, Linker B is a G/S or a G/A linker, such as those provided herein, and MAdCAMVK is a light chain variable domain.

[0497] In some embodiments, the PD-1 variable heavy domain is a PD-1 variable heavy chain domain as illustrated in PD-1 Antibody Table 4. In some embodiments, the variable heavy chain domain comprises the PD-1 variable heavy chain domain of Clone ID: PD1AB4, or PD1AB30 of PD-1 Antibody Table 4. In some embodiments, the PD-1 variable heavy chain domain comprises the CDRs of the PD-1 heavy domain of PD1AB4, or PD1AB30 of PD-1 Antibody Table 4. In some embodiments, the PD1VH comprises a sequence of SEQ ID NO: 637, or 769. In some embodiments, the PD1VH comprises a sequence of SEQ ID NO: 637. In some embodiments, the PD1VH comprises a sequence of SEQ ID NO: 769.

[0498] In some embodiments, the ConstantDomain comprises a IgG1 constant domain, such as those provided for herein. In some embodiments, the constant domain comprises mutations to render the constant region “effectorless,” that is unable to bind FcRs. The mutations that render constant regions effectorless are known. In some embodiments, the mutations in the constant region, which is according to the known numbering system, are selected from the group consisting of: K322A, L234A, L235A, G237A, L234F, L235E, N297, P331S, or any combination thereof. In some embodiments, the constant region mutations comprises a mutation at L234 and/or L235 and/or G237. In some embodiments, the constant region mutations comprise L234A and/or L235A mutations, which can be referred to as LALA mutations. In some embodiments, the constant region mutations comprise L234A, L235A, and G237A mutations. In some embodiments, the ConstantDomain comprises SEQ ID NO: 44.

[0499] In some embodiments, the PD-1 variable heavy chain domain comprises a first CDR of SEQ ID NO: 639, or 757, a second CDR of SEQ ID NO: 69, or 758, and a third CDR of SEQ ID NO: 640, or 759. In some embodiments, the PD-1 variable heavy chain domain comprises a first CDR of SEQ ID NO: 639, a second CDR of SEQ ID NO: 69, and a third CDR of SEQ ID NO: 640. In some embodiments, the PD-1 variable heavy chain domain comprises a first CDR of SEQ ID NO: 757, a second CDR of SEQ ID NO: 758, and a third CDR of SEQ ID NO: 759. These are illustrative only and the CDR sets as set forth herein and in the tables are also provided.

[0500] In some embodiments, the LinkerA is a glycine/serine linker, which can be any glycine/serine linker provided for herein. In some embodiments, the linker is a sequence of GGGGSGGGGSGGGGSGGGGS (SEQ ID NO: 22) or GGGGSGGGGSGGGGS (SEQ ID NO: 30). These are non-limiting examples and the linker can have varying number of GGGGS (SEQ ID NO: 23) or GGGGA repeats (SEQ ID NO: 29), or a mixture of the two. In some embodiments, the linker comprises 1, 2, 3, 4, 5, 6, 7, 8, 9, or 10 of the GGGGS (SEQ ID NO: 23) and/or GGGGA repeats (SEQ ID NO: 29) repeats. In some embodiments, the linker is 10 amino acids in length. In some embodiments, the linker is 5 amino acids in length. In some embodiments, the linker is 15 amino acids in length. In some embodiments, the linker is 20 amino acids in length. In some embodiments, the linker is 25 amino acids in length. In some embodiments, the linker is 30 amino acids in length. In some embodiments, the linker is 35 amino acids in length. In some embodiments, the linker is from 5-50 amino acids in length.

[0501] In some embodiments, the MAdCAM variable heavy domain is a MAdCAM variable heavy chain domain as illustrated in MAdCAM Antibody Table 2. In some embodiments, the variable heavy chain domain comprises the MAdCAM variable heavy chain domain of Clone ID: 6, 75, or 79 of MAdCAM Antibody Table 2. In some embodiments, the MAdCAM variable heavy chain domain comprises the CDRs of the MAdCAM heavy domain of 6, 75, or 79 of MAdCAM Antibody Table 2. In some embodiments, the MAdCAMVH comprises a sequence of SEQ ID NO: 414, SEQ ID NO: 591, and SEQ ID NO: 599.

[0502] In some embodiments, the LinkerB is a glycine/serine linker, which can be any glycine/serine linker provided for herein. In some embodiments, the linker is a sequence of GGGGSGGGGSGGGGSGGGGS (SEQ ID NO: 22) or GGGGSGGGGSGGGGS (SEQ ID NO: 30). These are non-limiting examples and the linker can have varying number of GGGGS (SEQ ID NO: 23) or GGGGA repeats (SEQ ID NO: 29), or a mixture of the two. In some embodiments, the linker comprises 1, 2, 3, 4, 5, 6, 7, 8, 9, or 10 of the GGGGS (SEQ ID NO: 23) and/or GGGGA repeats (SEQ ID NO: 29) repeats. In some embodiments, the linker is 10 amino acids in length. In some embodiments, the linker is 5 amino acids in length. In some embodiments, the linker is 15 amino acids in length. In some embodiments, the linker is 20 amino acids in length. In some embodiments, the linker is 25 amino acids in length. In some embodiments, the linker is 30 amino acids in length. In some embodiments, the linker is 35 amino acids in length. In some embodiments, the linker is from 5-50 amino acids in length.

[0503] In some embodiments, the MAdCAM variable light domain is a MAdCAM variable light chain domain as illustrated in MAdCAM Antibody Table 2. In some embodiments, the variable light chain domain comprises the MAdCAM variable light chain domain of Clone ID: 6, 75, or 79 of MAdCAM Antibody Table 2. In some embodiments, the MAdCAM variable light chain domain comprises the CDRs of the MAdCAM light domain of 6, 75, or 79 of MAdCAM Antibody Table 2. In some embodiments, the MAdCAMVK comprises a sequence of SEQ ID NO: 415, SEQ ID NO: 592, and SEQ ID NO: 600.

[0504] In some embodiments, the polypeptide further comprises a polypeptide of formula PD1VL-ConstantDomainLight, wherein PD is a PD-1 variable light chain and ConstantDomainLight is a IgG Kappa domain, wherein the polypeptide can be or is associated with the polypetide having the formula of PD1VH-ConstantDomain-LinkerA-MAdCAMscFv. In some embodiments, the PD1VL comprises a sequence of SEQ ID NO: 638, or 756. In some embodiments, the PD1VL comprises a sequence of SEQ ID NO: 638. In some embodiments, the PD1VL comprises a sequence of SEQ ID NO: 756. These are illustrative only and the VL domain can be VL/VK sequence provided for herein, such as in PD-1 Antibody Table 4. In some embodiments, the PD-1 variable light chain domain comprises a first CDR of SEQ ID NO: 641, or 760, a second CDR of SEQ ID NO: 362, or 378, and a third CDR of SEQ ID NO: 642, or 761. In some embodiments, the PD-1 variable light chain domain comprises a first CDR of SEQ ID NO: 641, a second CDR of SEQ ID NO: 362, and a third CDR of SEQ ID NO: 642. In some embodiments, the PD-1 variable light chain domain comprises a first CDR of SEQ ID NO: 760, a second CDR of SEQ ID NO: 378, and a third CDR of SEQ ID NO: 761. These are illustrative only and the CDR sets as set forth herein and in the tables are also provided.

[0505] In some embodiments, the constant domain also comprises mutations to negate the effector function, such as those provided for herein. In some embodiments, the ConstantDomainLight comprises a sequence of:

(SEQ ID NO: 45)
[sequence omitted]

Polypeptides Derived from Reference, e.g., Human Polypeptides

[0506] In some embodiments, a component of a therapeutic molecule is derived from or based on a reference molecule, e.g., in the case of a therapeutic molecule for use in humans, from a naturally occurring human polypeptide. E.g., in some embodiments, all or a part of a CD39 molecule, a CD73 molecule, a cell surface molecule binder, a donor specific targeting moiety, an effector ligand binding molecule, an ICIM binding/modulating moiety, an IIC binding/modulating moiety, an inhibitory immune checkpoint molecule ligand molecule, an inhibitory molecule counter ligand molecule, a SM binding/modulating moiety, a specific targeting moiety, a target ligand binding molecule, or a tissue specific targeting moiety, can be based on or derived from a naturally occurring human polypeptide. E.g., a PD-L1 molecule can be based on or derived from a human PD-L1 sequence.

[0507] In some embodiments, a therapeutic compound component, e.g., a PD-L1 molecule:
[0508] a) comprises all or a portion of, e.g., an active portion of, a naturally occurring form of the human polypeptide;
[0509] b) comprises all or a portion of, e.g., an active portion of, a human polypeptide having a sequence appearing in a database, e.g., GenBank database, on Jan. 11, 2017, a naturally occurring form of the human polypeptide that is not associated with a disease state;
[0510] c) comprises a human polypeptide having a sequence that differs by no more than 1, 2, 3, 4, 5, 10, 20, or 30 amino acid residues from a sequence of a) or b);
[0511] d) comprises a human polypeptide having a sequence that differs by no more than 1, 2, 3, 4, 5 10, 20, or 30% its amino acids residues from a sequence of a) orb);
[0512] e) comprises a human polypeptide having a sequence that does not differ substantially from a sequence of a) or b); or
[0513] f) comprises a human polypeptide having a sequence of c), d), or e) that does not differ substantially in biological activity, e.g., ability to enhance or inhibit an immune response, from a human polypeptide having the sequence of a) or b).

[0514] In some embodiments, therapeutic compounds can comprise a plurality of effector binding/modulating moieties. For example, a therapeutic compound can comprise two or more of the following selected from:

[0515] (a) an ICIM binding/modulating moiety; (b) an IIC binding/modulating moiety; (c) an SM binding/modulating moiety, or (d) an ICSM binding/modulating moiety. In some embodiments, for example, a therapeutic compound can comprise a plurality, e.g., two, ICIM binding/modulating moieties (wherein they are the same or different); by way of example, two that activate or agonize PD-1; a plurality, e.g., two, IIC binding/modulating moieties; (wherein they are the same or different); a plurality, e.g., two, SM binding/modulating moieties (wherein they are the same or different), or a plurality, e.g., tow, ICSM binding/modulating moieties (wherein they are the same or different). In some embodiments, the therapeutic compound can comprise an ICIM binding/modulating moiety and an IIC binding/modulating moiety; an ICIM binding/modulating moiety and an SM binding/modulating moiety; an IIC binding/modulating moiety and an SM binding/modulating moiety, an ICIM binding/modulating moiety and an ICSM binding/modulating moiety; an IIC binding/modulating moiety and an ICSM binding/modulating moiety; or an ICSM binding/modulating moiety and an SM binding/modulating moiety. In some embodiments, the therapeutic compound comprises a plurality of targeting moieties. In some embodiments, the targeting moieties can be the same or different.

### Pharmaceutical Compositions and Kits

[0516] In another aspect, the present embodiments provide compositions, e.g., pharmaceutically acceptable compositions, which include a therapeutic compound described herein, formulated together with a pharmaceutically acceptable carrier. As used herein, “pharmaceutically acceptable carrier” includes any and all solvents, dispersion media, isotonic and absorption delaying agents, and the like that are physiologically compatible.

[0517] The carrier can be suitable for intravenous, intramuscular, subcutaneous, parenteral, rectal, local, ophthalmic, topical, spinal or epidermal administration (e.g., by injection or infusion). As used herein, the term “carrier” means a diluent, adjuvant, or excipient with which a compound is administered. In some embodiments, pharmaceutical carriers can also be liquids, such as water and oils, including those of petroleum, animal, vegetable or synthetic origin, such as peanut oil, soybean oil, mineral oil, sesame oil, and the like. The pharmaceutical carriers can also be saline, gum acacia, gelatin, starch paste, talc, keratin, colloidal silica, urea, and the like. In addition, auxiliary, stabilizing, thickening, lubricating, and coloring agents can be used. The carriers can be used in pharmaceutical compositions comprising the therapeutic compounds provided for herein.

[0518] The compositions and compounds of the embodiments provided herein may be in a variety of forms. These include, for example, liquid, semi-solid and solid dosage forms, such as liquid solutions (e.g., injectable and infusible solutions), dispersions or suspensions, liposomes and suppositories. The preferred form depends on the intended mode of administration and therapeutic application. Typical compositions are in the form of injectable or infusible solutions. In some embodiments, the mode of administration is parenteral (e.g., intravenous, subcutaneous, intraperitoneal, intramuscular). In some embodiments, the therapeutic molecule is administered by intravenous infusion or injection. In another embodiment, the therapeutic molecule is administered by intramuscular or subcutaneous injection. In another embodiment, the therapeutic molecule is administered locally, e.g., by injection, or topical application, to a target site. The phrases “parenteral administration” and “administered parenterally” as used herein means modes of administration other than enteral and topical administration, usually by injection, and includes, without limitation, intravenous, intramuscular, intraarterial, intrathecal, intracapsular, intraorbital, intracardiac, intradermal, intraperitoneal, transtracheal, subcutaneous, subcuticular, intraarticular, subcapsular, subarachnoid, intraspinal, epidural and intrasternal injection, and infusion.

[0519] Therapeutic compositions typically should be sterile and stable under the conditions of manufacture and storage. The composition can be formulated as a solution, microemulsion, dispersion, liposome, or other ordered structure suitable to high therapeutic molecule concentration. Sterile injectable solutions can be prepared by incorporating the active compound (i.e., therapeutic molecule) in the required amount in an appropriate solvent with one or a combination of ingredients enumerated above, as required, followed by filtered sterilization. Generally, dispersions are prepared by incorporating the active compound into a sterile vehicle that contains a basic dispersion medium and the required other ingredients from those enumerated above. In the case of sterile powders for the preparation of sterile injectable solutions, the preferred methods of preparation are vacuum drying and freeze-drying that yields a powder of the active ingredient plus any additional desired ingredient from a previously sterile-filtered solution thereof. The proper fluidity of a solution can be maintained, for example, by the use of a coating such as lecithin, by the maintenance of the required particle size in the case of dispersion and by the use of surfactants. Prolonged absorption of injectable compositions can be brought about by including in the composition an agent that delays absorption, for example, monostearate salts and gelatin.

[0520] As will be appreciated by the skilled artisan, the route and/or mode of administration will vary depending upon the desired results. In certain embodiments, the active compound may be prepared with a carrier that will protect the compound against rapid release, such as a controlled release formulation, including implants, transdermal patches, and microencapsulated delivery systems. Biodegradable, biocompatible polymers can be used, such as ethylene vinyl acetate, polyanhydrides, polyglycolic acid, collagen, polyorthoesters, and polylactic acid. Many methods for the preparation of such formulations are patented or generally known to those skilled in the art. See, e.g., Sustained and Controlled Release Drug Delivery Systems, J. R. Robinson, ed., Marcel Dekker, Inc., New York, 1978.

[0521] In certain embodiments, a therapeutic compound can be orally administered, for example, with an inert diluent or an assimilable edible carrier. The compound (and other ingredients, if desired) may also be enclosed in a hard or soft shell gelatin capsule, compressed into tablets, or incorporated directly into the subject's diet. For oral therapeutic administration, the compounds may be incorporated with excipients and used in the form of ingestible tablets, buccal tablets, troches, capsules, elixirs, suspensions, syrups, wafers, and the like. To administer a compound by other than parenteral administration, it may be necessary to coat the compound with, or co-administer the compound with, a material to prevent its inactivation. Therapeutic compositions can also be administered with medical devices known in the art.

Dosage regimens are adjusted to provide the optimum desired response (e.g., a therapeutic response). For example, a single bolus may be administered, several divided doses may be administered over time or the dose may be proportionally reduced or increased as indicated by the exigencies of the therapeutic situation. It is especially advantageous to formulate parenteral compositions in dosage unit form for ease of administration and uniformity of dosage. Dosage unit form as used herein refers to physically discrete units suited as unitary dosages for the subjects to be treated; each unit contains a predetermined quantity of active compound calculated to produce the desired therapeutic effect in association with the required pharmaceutical carrier. The specification for the dosage unit forms are dictated by and directly dependent on (a) the unique characteristics of the active compound and the particular therapeutic effect to be achieved, and (b) the limitations inherent in the art of compounding such an active compound for the treatment of sensitivity in individuals.
An exemplary, non-limiting range for a therapeutically or prophylactically effective amount of a therapeutic compound is 0.1-30 mg/kg, more preferably 1-25 mg/kg. Dosages and therapeutic regimens of the therapeutic compound can be determined by a skilled artisan. In certain embodiments, the therapeutic compound is administered by injection (e.g., subcutaneously or intravenously) at a dose of about 1 to 40 mg/kg, e.g., 1 to 30 mg/kg, e.g., about 5 to 25 mg/kg, about 10 to 20 mg/kg, about 1 to 5 mg/kg, 1 to 10 mg/kg, 5 to 15 mg/kg, 10 to 20 mg/kg, 15 to 25 mg/kg, or about 3 mg/kg. The dosing schedule can vary from e.g., once a week to once every 2, 3, or 4 weeks. In one embodiment, the therapeutic compound is administered at a dose from about 10 to 20 mg/kg every other week. The therapeutic compound can be administered by intravenous infusion at a rate of more than 20 mg/min, e.g., 20-40 mg/min, and typically greater than or equal to 40 mg/min to reach a dose of about 35 to 440 mg/m2, typically about 70 to 310 mg/m2, and more typically, about 110 to 130 mg/m2. In embodiments, the infusion rate of about 110 to 130 mg/m2 achieves a level of about 3 mg/kg. In other embodiments, the therapeutic compound can be administered by intravenous infusion at a rate of less than 10 mg/min, e.g., less than or equal to 5 mg/min to reach a dose of about 1 to 100 mg/m2, e.g., about 5 to 50 mg/m2, about 7 to 25 mg/m2, or, about 10 mg/m2. In some embodiments, the therapeutic compound is infused over a period of about 30 min. It is to be noted that dosage values may vary with the type and severity of the condition to be alleviated. It is to be further understood that for any particular subject, specific dosage regimens should be adjusted over time according to the individual need and the professional judgment of the person administering or supervising the administration of the compositions, and that dosage ranges set forth herein are exemplary only and are not intended to limit the scope or practice of the claimed composition.
The pharmaceutical compositions may include a “therapeutically effective amount” or a “prophylactically effective amount” of a therapeutic molecule. A “therapeutically effective amount” refers to an amount effective, at dosages and for periods of time necessary, to achieve the desired therapeutic result. A therapeutically effective amount of a therapeutic molecule may vary according to factors such as the disease state, age, sex, and weight of the individual, and the ability of the therapeutic compound to elicit a desired response in the individual. A therapeutically effective amount is also one in which any toxic or detrimental effects of a therapeutic molecule t is outweighed by the therapeutically beneficial effects. A “therapeutically effective dosage” preferably inhibits a measurable parameter, e.g., immune attack at least about 20%, more preferably by at least about 40%, even more preferably by at least about 60%, and still more preferably by at least about 80% relative to untreated subjects. The ability of a compound to inhibit a measurable parameter, e.g., immune attack, can be evaluated in an animal model system predictive of efficacy in transplant rejection or autoimmune disorders. Alternatively, this property of a composition can be evaluated by examining the ability of the compound to inhibit, such inhibition in vitro by assays known to the skilled practitioner.

[0522] A “prophylactically effective amount” refers to an amount effective, at dosages and for periods of time necessary, to achieve the desired prophylactic result. Typically, since a prophylactic dose is used in subjects prior to or at an earlier stage of disease, the prophylactically effective amount will be less than the therapeutically effective amount.

[0523] Also within the scope of the embodiments is a kit comprising a therapeutic compound described herein. The kit can include one or more other elements including: instructions for use; other reagents, e.g., a label, a therapeutic agent, or an agent useful for chelating, or otherwise coupling, a therapeutic molecule to a label or other therapeutic agent, or a radioprotective composition; devices or other materials for preparing the a therapeutic molecule for administration; pharmaceutically acceptable carriers; and devices or other materials for administration to a subject.

[0524] In some embodiments, embodiments provided herein also include, but are not limited to:

1. A therapeutic compound comprising:
[0525] i) a specific targeting moiety selected from:
   [0526] a) a donor specific targeting moiety which, e.g., preferentially binds a donor target; or
   [0527] b) a tissue specific targeting moiety which, e.g., preferentially binds target tissue of a subject; and
[0528] ii) an effector binding/modulating moiety selected from:
   [0529] (a) an immune cell inhibitory molecule binding/modulating moiety (ICIM binding/modulating moiety);
   [0530] (b) an immunosuppressive immune cell binding/modulating moiety (IIC binding/modulating moiety); or
   [0531] (c) an effector binding/modulating moiety that, as part of a therapeutic compound, promotes an immuno-suppressive local microenvironment, e.g., by providing in the proximity of the target, a substance that inhibits or minimizes attack by the immune system of the target (SM binding/modulating moiety).
      2. The therapeutic compound of embodiment 1, wherein the effector binding/modulating moiety directly binds and activates an inhibitory receptor.
      3. The therapeutic compound of embodiment 2, wherein the effector binding/modulating moiety is an inhibitory immune checkpoint molecule.
      4. The therapeutic compound of any of embodiments 1-3, wherein the effector binding/modulating moiety is expressed by an immune cell.
      5. The therapeutic compound of embodiment 4, wherein the immune cell contributes to an unwanted immune response.
      6. The therapeutic compound of embodiments 4 or 5, wherein the immune cell causes a disease pathology.
      7. The therapeutic compound of embodiment 1, wherein the ability of the therapeutic molecule to agonize the molecule to which the effector binding/modulating binds is greater, e.g., 2, 5, 10, 100, 500, or 1,000 times greater, when the therapeutic compound is bound to a target through the targeting moiety than when the therapeutic compound is not bound to target through the targeting moiety.
      8. The therapeutic compound of embodiments 1-7, wherein when binding as a monomer (or binding when the therapeutic compound is not multimerized), to its cognate ligand, e.g., an inhibitory immune checkpoint molecule, does not agonize or substantially agonize, the cognate ligand.
      9. The therapeutic compound of embodiments 1-8, wherein at a therapeutically effective dose of the therapeutic compound, there is significant, systemic agonization of the molecule to which the effector binding/modulating moiety binds.
      10. The therapeutic compound of embodiments 1-9, wherein at a therapeutically effective dose of the therapeutic compound, the agonization of the molecule to which the effector binding/modulating moiety binds occurs substantially only at a target site to which the targeting moiety binds to.
      11. The therapeutic compound of embodiments 1-9, wherein binding of the therapeutic compound to its cognate ligand, e.g., an inhibitory immune checkpoint molecule, does not inhibit, or does not substantially inhibit, binding of an endogenous counter ligand to the cognate ligand, e.g., an inhibitory immune checkpoint molecule.
      12. The therapeutic compound of embodiments 1-11, wherein binding of the effector binding/modulating moiety to its cognate ligand, inhibits the binding of an endogenous counter ligand to the cognate ligand of the effector binding/modulating moiety by less than 60, 50, 40, 30, 20, 10, or 5%.
      14. The therapeutic compound of embodiments 1-11, wherein binding of the effector binding/modulating moiety to the cognate ligand, results in substantially no antagonism of the cognate ligand of the effector binding/modulating molecule.
      15. The therapeutic compound of embodiment 1, wherein the effector binding/modulating moiety comprises an ICIM binding/modulating moiety.
      16. The therapeutic compound of embodiment 15, wherein the effector binding/modulating moiety comprises an ICIM binding/modulating moiety comprising an inhibitory immune checkpoint molecule ligand molecule.
      17. The therapeutic compound of embodiment 16, wherein the inhibitory immune molecule counter-ligand molecule comprises a PD-L1 molecule.
      18. The therapeutic compound of embodiment 15, wherein the ICIM is wherein the inhibitory immune molecule counter ligand molecule engages a cognate inhibitory immune checkpoint molecule selected from PD-1, KIR2DL4, LILRB1, LILRB, or CTLA-4.
      19. The therapeutic compound of embodiment 18, wherein the ICIM is an antibody.
      20. The therapeutic compound of embodiment 18, wherein the ICIM comprises an antibody that binds to PD-1, KIR2DL4, LILRB1, LILRB, or CTLA-4.
      21. The therapeutic compound of embodiment 20, wherein the antibody is an antibody that binds to PD-1.
      22. The therapeutic compound of embodiment 20, wherein the antibody is an antibody that binds to PD-1 and is a PD-1 agonist.
      23. The therapeutic compound of embodiment 20, wherein the antibody is an antibody that binds to PD-1 and is a PD-1 agonist when tethered at a target site.
      24. The therapeutic compound of embodiment 16, wherein the inhibitory immune molecule counter-ligand molecule comprises a HLA-G molecule.
      25. The therapeutic compound of embodiment 15, wherein the ICIM is wherein the inhibitory immune molecule counter ligand molecule engages a cognate inhibitory immune checkpoint molecule selected from PD-1, KIR2DL4, LILRB1, LILRB, or CTLA-4.
      26. The therapeutic compound of embodiment 15, wherein the inhibitory immune molecule counter ligand molecule engages a cognate inhibitory immune checkpoint molecule selected from Table 1.
      27. The therapeutic compound of embodiment 15, wherein when binding as a monomer, to its cognate inhibitory immune checkpoint molecule, does not agonize or substantially agonize the inhibitory immune checkpoint molecule.
      28. The therapeutic compound of embodiment 15, wherein the inhibitory immune molecule counter ligand has at least 60, 70, 80, 90, 95, 99, or 100% homology with a naturally occurring inhibitory immune checkpoint molecule ligand.
      29 The therapeutic compound of embodiment 1, wherein the effector binding/modulating moiety comprises a ICIM binding/modulating moiety which comprises a functional antibody molecule to a cell surface inhibitory molecule.
      30. The therapeutic compound of embodiment 1, wherein the cell surface inhibitory molecule is an inhibitory immune checkpoint molecule.
      31. The compound of embodiment 30, wherein the inhibitory immune checkpoint molecule is selected from PD-1, KIR2DL4, LILRB1, LILRB2, CTLA-4, or selected from Table 1.
      32. The therapeutic compound of any of embodiments 1-31, wherein the level of systemic immune suppression at a therapeutically effective dose of the therapeutic compound, is less than that given by the standard of care with a systemic immune suppressant (if relevant), or is less than that given by an equimolar amount of free (not as a component of a therapeutic compound), effector binding/modulating molecule.
      33. The therapeutic compound of embodiment 1-32, wherein the level of systemic immune activation, e.g., at a therapeutically effective dose of the therapeutic compound, is less than that given by a equimolar amount of free (not as a component of a therapeutic compound), effector binding/modulating molecule.
      34. The therapeutic compound of any one of embodiments 1-33, further comprising a second effector binding/modulating moiety.
      35. The therapeutic compound of embodiment 34, wherein the second effector binding/modulating moiety, binds a different target than the effector binding/modulating moiety.
      36. The therapeutic compound embodiments 34 or 35, wherein the second effector binding/modulating moiety comprises a IIC binding/modulating moiety.
      36A. The therapeutic compound embodiments 34 or 35, wherein the second effector binding/modulating moiety comprises an SM binding/modulating moiety.

[0532] 37. The therapeutic compound of embodiment 1, wherein the effector binding/modulating moiety comprises an IIC binding/modulating moiety.

38. The therapeutic compound of embodiment 1, wherein the effector binding/modulating moiety comprises an IIC binding/modulating moiety, which, increases, recruits or accumulates an immunosuppressive immune cell at the target site.
39. The therapeutic compound of embodiment 1, wherein the effector binding/modulating moiety comprises a cell surface molecule binder which binds or specifically binds, a cell surface molecule on an immunosuppressive immune cell.
40. The therapeutic compound of embodiment 1, wherein the effector binding/modulating moiety comprises a cell surface molecule ligand molecule that binds or specifically binds, a cell surface molecule on an immunosuppressive immune cell.
41. The therapeutic compound of embodiment 1, wherein the effector binding/modulating moiety comprises an antibody molecule that binds a cell surface molecule on an immunosuppressive immune cell.
42. The therapeutic compound of any of embodiments 38-41, wherein the immunosuppressive immune cell comprises a T regulatory cell, such as a a Foxp3+CD25+T regulatory cell.
43. The therapeutic compound of any of embodiments 1-42, wherein the effector binding/modulating moiety binds GARP, and e.g., comprises an antibody molecule that binds GARP on GARP expressing immunosuppressive cells, e.g., Tregs.
44. The therapeutic compound of embodiment 1, wherein the effector binding/modulating moiety comprises an SM binding/modulating moiety.
45. The therapeutic compound of embodiment 44, wherein SM binding/modulating moiety promotes an immuno-suppressive local microenvironment.
46. The therapeutic compound of any of embodiments 44 and 45, wherein the effector molecule binding moiety increases the availability, e.g., by increasing the local concentration or amount, of a substance which inhibits immune cell function, e.g., a substance that inhibits the activation of an immune cell or the function of an activated immune cell.
47. The therapeutic compound of any of embodiments 44-46, wherein the effector molecule binding moiety binds and accumulate a soluble substance, e.g., an endogenous or exogenous substance, having immunosuppressive function.
48. The therapeutic compound of any of embodiments 44-47, wherein the effector molecule binding moiety decreases the availability, e.g., by decreasing the local concentration or amount, or sequestering, of a substance which promotes immune cell function, e.g., a substance that promotes the activation of an immune cell or the function of an activated immune cell.
49. The therapeutic compound of any one of embodiments 44-48, wherein SM binding/modulating moiety promotes an immuno-suppressive local microenvironment, e.g., by providing in the proximity of the target, a substance that inhibits or minimizes attack by the immune system of the target.
50. The therapeutic compound of any one of embodiments 44-49, wherein the SM binding/modulating moiety comprises a molecule that inhibits or minimizes attack by the immune system of the target.
51. The therapeutic compound any one of embodiments 44-50, wherein the SM binding/modulating moiety binds and/or accumulate a soluble substance, e.g., an endogenous or exogenous substance having immunosuppressive function.
52. The therapeutic compound any one of embodiments 44-51, wherein the SM binding/modulating moiety binds and/or inhibits, sequesters, degrades or otherwise neutralizes a substance, e.g., a soluble substance, typically and endogenous soluble substance, that promotes immune attack.
53. The therapeutic compound any one of embodiments 44-52, wherein the effector molecule binding moiety decreases the availability of ATP or AMP.
54. The therapeutic compound any one of embodiments 44-53, wherein SM binding/modulating moiety binds, or comprises, a substance, e.g., CD39 or CD73, that depletes a component that promotes immune effector cell function, e.g., ATP or AMP.
55. The therapeutic compound any one of embodiments 44-54, wherein the SM binding/modulating moiety comprises a CD39 molecule.
56. The therapeutic compound any one of embodiments 44-54, wherein the SM binding/modulating moiety comprises a CD73 molecule.
57. The therapeutic compound any one of embodiments 44-54, wherein the SM binding/modulating moiety comprises an anti-CD39 molecule.
58. The therapeutic compound any one of embodiments 44-54, wherein the SM binding/modulating moiety comprises an anti-CD73 antibody molecule.
59. The therapeutic compound any one of embodiments 44-54, wherein the effector molecule binding moiety comprises an immune-suppressive substance, e.g. a fragment an immunosuppressive protein.
60. The therapeutic compound any one of embodiments 44-54, wherein SM binding/modulating moiety comprises alkaline phosphatase molecule.
61. The therapeutic compound of embodiment 1, wherein the compound has the formula from N-terminus to C-terminus:

R1-Linker Region A-R2 or R3-Linker Region B-R4,

wherein,
[0533] R1, R2, R3, and R4, each independently comprises an effector binding/modulating moiety, e.g., an ICIM binding/modulating moiety, an IIC binding/modulating moiety, or an SM binding/modulating moiety; a specific targeting moiety; or is absent; provided that an effector binding/modulating moiety and a specific targeting moiety are present.
   62. The therapeutic compound of embodiment 61, wherein each of Linker Region A and Linker Region B comprises an Fc region.
   63. The therapeutic compound of embodiment 61, wherein one of R1 and R2 is anti-PD-1 antibody and one of R1 and R2 is an anti-MAdCAM antibody.
   64. The therapeutic compound of embodiment 61, wherein one of R1 is anti-PD-1 antibody and one R2 is an anti-MAdCAM antibody.
   65. The therapeutic compound of embodiment 61, wherein one of R1 is anti-MAdCAM antibody and one R2 is an anti-PD-1 antibody.
   66. The therapeutic compound of embodiment 61, wherein one of R3 and R4 is anti-PD-1 antibody and one of R3 and R4 is an anti-MAdCAM antibody.
   67. The therapeutic compound of embodiment 61, wherein one of R3 is anti-PD-1 antibody and one R4 is an anti-MAdCAM antibody.
   68. The therapeutic compound of embodiment 61, wherein one of R3 is anti-MAdCAM antibody and one R4 is an anti-PD-1 antibody.
   69. The therapeutic compound of any of embodiments 61-68, wherein the linker is absent.
   70. The therapeutic compound of any of embodiments 61-68, wherein the linker is a Fc region.
   71. The therapeutic compound of any of embodiments 61-68, wherein the linker is a glycine/serine linker, such as 1, 2, 3, 4, or 5 repeats of GGGGS (SEQ ID NO: 23).
   72. The therapeutic compound of any of embodiments 61-68, wherein the linker comprises a Fc region and a glycine/serine linker, such as 1, 2, 3, 4, or 5 repeats of GGGGS (SEQ ID NO: 23).
   73. The therapeutic compound of any of embodiments 61-72, wherein the PD-1 antibody is a PD-1 agonist.
   74. The therapeutic compound of embodiment 61, wherein:

[0534] R1 and R3 independently comprise a functional anti-PD-1 antibody molecule (an agonist of PD-1); and R2 and R4 independently comprise specific targeting moieties, e.g., scFv molecules against a tissue antigen.

75. The therapeutic compound of any of embodiments 73 and 74, wherein:

[0535] R1 and R3 independently comprise specific targeting moieties, e.g., an anti-tissue antigen antibody; and R2 and R4 independently comprise a functional anti-PD-1 antibody molecule (an agonist of PD-1).

76. The therapeutic compound of any of embodiments 73 and 74, wherein:
R1, R2, R3 and R4 each independently comprise: an SM binding/modulating moiety which modulates, e.g., binds and inhibits, sequesters, degrades or otherwise neutralizes a substance, e.g., a soluble molecule that modulates an immune response, e.g., ATP or AMP, e.g., a CD39 molecule or a CD73 molecule; a specific targeting moiety; or is absent;
provided that an SM binding/modulating moiety and a specific targeting moiety are present.
77. The therapeutic compound of embodiment 61, wherein:
R1 and R3 independently comprise a CD39 molecule or a CD73 molecule; and
R2 and R4 independently comprise specific targeting moieties, e.g., scFv molecules against a tissue antigen.
78. The therapeutic compound of embodiment 77, wherein:
R1 and R3 each comprises a CD39 molecule; and
R2 and R4 independently comprise specific targeting moieties, e.g., scFv molecules against a tissue antigen.
79. The therapeutic compound of embodiments 61 or 77, wherein:
R1 and R3 each comprises a CD73 molecule; and
R2 and R4 independently comprise specific targeting moieties, e.g., scFv molecules against a tissue antigen.
80. The therapeutic compound of embodiment 61, wherein:
one of R1 and R3 comprises a CD39 molecule and the other comprises a CD73 molecule; and R2 and R4 independently comprise specific targeting moieties, e.g., scFv molecules against a tissue antigen.
81. The therapeutic compound of embodiment 61, wherein:
R1, R2, R3 and R4 each independently comprise: an HLA-G molecule; a specific targeting moiety; or is absent;
provided that an HLA-G molecule and a specific targeting moiety are present.
82. The therapeutic compound of embodiments 61 or 81, wherein:
R1 and R3 each comprise an HLG-A molecule; and
R2 and R4 independently comprise specific targeting moieties, e.g., scFv molecules against a tissue antigen.
In some embodiments, Linker A and Linker B comprise Fc moieties (e.g., self pairing Fc moieties or Fc moieties that do not, or do not substantially self pair).
83. The therapeutic compound of any of embodiments 81 and 82, wherein:
R1 and R3 each comprise an agonistic anti-LILRB1 antibody molecule; and
R2 and R4 independently comprise specific targeting moieties, e.g., scFv molecules against a tissue antigen.
In some embodiments, Linker A and Linker B comprise Fc moieties (e.g., self pairing Fc moieties or Fc moieties that do not, or do not substantially self pair).
84. The therapeutic compound of any of embodiments 81 and 82, wherein:
R1 and R3 each comprise an agonistic anti-KIR2DL4 antibody molecule; and
R2 and R4 independently comprise specific targeting moieties, e.g., scFv molecules against a tissue antigen.
In some embodiments, Linker A and Linker B comprise Fc moieties (e.g., self pairing Fc moieties or Fc moieties that do not, or do not substantially self pair).
85. The therapeutic compound of any of embodiments 81-84, wherein:
R1 and R3 each comprise an agonistic anti-LILRB2 antibody molecule; and
R2 and R4 independently comprise specific targeting moieties, e.g., scFv molecules against a tissue antigen.
86. The therapeutic compound of any of embodiments 81-84, wherein:
R1 and R3 each comprise an agonistic anti-NKG2A antibody molecule; and
R2 and R4 independently comprise specific targeting moieties, e.g., scFv molecules against a tissue antigen.
87. The therapeutic compound of any of embodiments 81-84, wherein:
one of R1 and R3 comprises a first moiety chosen from, and the other comprises a different moiety chosen from: an antagonistic anti-LILRB1 antibody molecule, an agonistic anti-KR2DL4 antibody molecule, and an agonistic anti-NKG2A antibody molecule; and R2 and R4 independently comprise specific targeting moieties, e.g., scFv molecules against a tissue antigen.
88. The therapeutic compound of any of embodiments 81-84, wherein:
one of R1 and R3 comprises an antagonistic anti-LILRB1 antibody molecule and the other comprises an agonistic anti-KR2DL4 antibody molecule; and
R2 and R4 independently comprise specific targeting moieties, e.g., scFv molecules against a tissue antigen.
89. The therapeutic compound of any of embodiments 81-84, wherein:
one of R1 and R3 comprises an antagonistic anti-LILRB1 antibody molecule and the other comprises an agonistic anti-NKG2A antibody molecule; and
R2 and R4 independently comprise specific targeting moieties, e.g., scFv molecules against a tissue antigen.
90. The therapeutic compound of any of embodiments 81-84 wherein:

[0536] R1, R2, R3 and R4 each independently comprise: an IL-2 mutein molecule; a specific targeting moiety; or is absent; and

[0537] provided that an IL-2 mutein molecule and a specific targeting moiety are present.

91. The therapeutic compound of embodiment 90, wherein:

[0538] R1 and R3 each comprise an IL-2 mutein molecule; and

[0539] R2 and R4 independently comprise specific targeting moieties, e.g., scFv molecules against a tissue antigen.

92. The therapeutic compound of embodiments 90 or 91, wherein:

[0540] one of R1 and R3 comprises a MAdCAM binding molecule, e.g., an anti-MAdCAM antibody molecule or a GITR binding molecule, e.g., an anti-GITR antibody molecule and the other comprises an IL-2 mutein molecule; and

[0541] R2 and R4 independently comprise specific targeting moieties, e.g., scFv molecules against a tissue antigen.

93. The therapeutic compound of embodiments 90 or 91, wherein:

[0542] one of R1 and R3 comprises a GARP binding molecule, e.g., an anti-GARP antibody molecule and the other comprises an IL-2 mutein molecule; and

[0543] R2 and R4 independently comprise specific targeting moieties, e.g., scFv molecules against a tissue antigen.

94. The therapeutic compound of embodiments 90 or 91, wherein:

[0544] one of R1 and R3 comprises a GARP binding molecule, e.g., an anti-GARP antibody molecule or a GITR binding molecule, e.g., an anti-GITR antibody molecule and the other comprises an IL-2 mutein molecule; and

[0545] R2 and R4 independently comprise specific targeting moieties, e.g., scFv molecules against a tissue antigen.

95. The therapeutic compound of embodiments 90 or 91, wherein:

[0546] one of R1 and R3 comprises a GARP binding molecule, e.g., an anti-GARP antibody molecule and the other comprises an IL-2 mutein molecule; and

[0547] R2 and R4 independently comprise specific targeting moieties, e.g., scFv molecules against a tissue antigen.

96. The therapeutic compound of embodiments 90 or 91, wherein:

[0548] one of R1 and R3 comprises a GITR binding molecule, e.g., an anti-GITR antibody molecule, and the other comprises an IL-2 mutein molecule; and

[0549] R2 and R4 independently comprise specific targeting moieties, e.g., scFv molecules against a tissue antigen.

97. The therapeutic compound of embodiment 1, wherein the compound is a polypeptide or protein, wherein the polypeptide or protein comprises a targeting moiety that binds to a target cell and an effector binding/modulating moiety, wherein the effector binding/modulating moiety is a IL-2 mutant polypeptide (IL-2 mutein).
98. The therapeutic compound of embodiment 97, wherein the targeting moiety comprises an antibody that binds to a target protein on the surface of a target cell.
99. The therapeutic compound of embodiment 98, wherein the antibody is an antibody that binds to MAdCAM, OAT1 (SLC22A6), OCT2 (SLC22A2), FXYD2, TSPAN7, DPP6, HEPACAM2, TMEM27, or GPR119.
100. The therapeutic compound of embodiment 98, wherein the IL-2 mutein binds to a receptor expressed by an immune cell.
101. The therapeutic compound of embodiment 98, wherein the immune cell contributes to an unwanted immune response.
102. The therapeutic compound of any of embodiments 97-101, wherein the immune cell causes a disease pathology.
103. The therapeutic compound of any of embodiments 97-102, wherein the targeting moiety comprises an anti-MAdCAM antibody.
104. The therapeutic compound of embodiment 97, wherein the compound has the formula from N-terminus to C-terminus:

R1-Linker Region A-R2 or R3-Linker Region B-R4,

wherein,

[0550] R1, R2, R3, and R4, each independently comprises the effector binding/modulating moiety, the targeting moiety, or is absent.

105. The therapeutic compound of embodiment 104, wherein each of Linker Region A and Linker Region B comprises an Fc region.
106. The therapeutic compound of embodiments 104 or 105 or, wherein one of R1 and R2 is the IL-mutein antibody and one of R1 and R2 is an anti-MAdCAM antibody.
107. The therapeutic compound of embodiments 104, 105, or 106, wherein R1 is the IL-mutein and R2 is an anti-MAdCAM antibody.
108. The therapeutic compound of embodiments 104, 105, or 106, wherein one of R1 is anti-MAdCAM antibody and one R2 is an anti-PD-1 antibody.
109. The therapeutic compound of embodiments 104, 105, or 106, wherein one of R3 and R4 is the IL-2 mutein and one of R3 and R4 is an anti-MAdCAM antibody.
110. The therapeutic compound of embodiments 104, 105, or 106, wherein R3 is the IL-2 mutein and R4 is an anti-MAdCAM antibody.
111. The therapeutic compound of embodiments 104, 105, or 106, wherein R3 is an anti-MAdCAM antibody and one R4 is the IL-2 mutein.
112. The therapeutic compound of any of embodiments 104-111, wherein the linker is absent.
113. The therapeutic compound of any of embodiments 104-111, wherein the linker is or comprises a Fc region.
114. The therapeutic compound of any of embodiments 104-111, wherein the linker comprises a glycine/serine linker.
115. The therapeutic compound of any of embodiments 104-111, wherein the linker comprises a sequence of GGGGSGGGGSGGGGSGGGGS (SEQ ID NO: 22), GGGGSGGGGSGGGGS (SEQ ID NO: 30), GGGGSGGGGS (SEQ ID NO: 792), or GGGGS (SEQ ID NO: 23).
116. The therapeutic compound of embodiment 97, wherein the IL-2 mutein comprises a IL-2 sequence of SEQ ID NO: 6, wherein peptide comprises a mutation at a position that corresponds to position 53, 56, 80, or 118 of SEQ ID NO: 6.
117. The therapeutic compound of any of embodiments 97-116, wherein the IL-2 mutein comprises a IL-2 sequence of SEQ ID NO: 6, wherein peptide comprises a mutation at a position that corresponds to position 53, 56, 80, or 118 of SEQ ID NO: 6.
118. The therapeutic compound of embodiment 116, wherein the mutation is a L to I mutation at position 53, 56, 80, or 118.
119. The therapeutic compound of embodiment 117, wherein the mutation is a L to I mutation at position 53, 56, 80, or 118.
120. The therapeutic compound of any of embodiments 97-119, wherein the IL-2 mutein further comprises a mutation at one or more positions of 29, 31, 35, 37, 48, 69, 71, 74, 88, and 125 corresponding to those positions in SEQ ID NO: 6.
121. The therapeutic compound of any of embodiments 97-120, wherein the IL-2 mutein further comprises a mutation at one or more of positions E15, H16, Q22, D84, E95, or Q126 or 1, 2, 3, 4, 5, or each of positions E15, H16, Q22, D84, E95, or Q126 is wild-type.
122. The therapeutic compound of any of embodiments 97-121, wherein the mutation in the mutein is one or more of E15Q, H16N, Q22E, D84N, E95Q, or Q126E.
123. The therapeutic compound of any of embodiments 97-122, wherein the mutein comprises a N29S mutation in SEQ ID NO: 6.
124. The therapeutic compound of any of embodiments 97-123, wherein the mutein comprises a Y31S or a Y51H mutation.
125. The therapeutic compound of any of embodiments 97-124, wherein the mutein comprises a K35R mutation.
126. The therapeutic compound of any of embodiments 97-125, wherein the mutein comprises a T37A mutation.
127. The therapeutic compound of any of embodiments 97-126, wherein the mutein comprises a K48E mutation.
128. The therapeutic compound of any of embodiments 97-127, wherein the mutein comprises a V69A mutation.
129. The therapeutic compound of any of embodiments 97-128, wherein the mutein comprises a N71R mutation.
130. The therapeutic compound of any of embodiments 97-129, wherein the mutein comprises a Q74P mutation.
131. The therapeutic compound of any of embodiments 97-130, wherein the mutein comprises a N88D or a N88R mutation.
132. The therapeutic compound of any of embodiments 97-131, wherein the mutein comprises a C125A or C125S mutation.
133. The therapeutic compound of any of embodiments 97-132, wherein the IL-2 mutein is fused or linked to a Fc peptide.
134. The therapeutic compound of embodiment 133, wherein the Fc peptide comprises a mutation at one or more of positions of L234, L247, L235, L248, G237, and G250.
135. The therapeutic compound of embodiment 134, wherein the mutation is L to A or G to A mutation.
136. The therapeutic compound of embodiment 134, wherein the Fc peptide comprises L247A, L248A, and/or a G250A mutations (Kabat numbering).
137. The therapeutic compound of embodiment 134, wherein the Fc peptide comprises a L234A mutation, a L235A mutation, and/or a G237A mutation (EU numbering).
138. The therapeutic compound of embodiment 97, wherein the compound comprises a polypeptide comprising a first chain and a second chain that form the polypeptide, wherein

[0551] the first chain comprises:

[0552] V_{H}-H_{c}-Linker-C₁, wherein V_{H} is a variable heavy domain that binds to the target cell with a V_{L} domain of the second chain; H_{c} is a heavy chain of antibody comprising CH1-CH2-CH3 domain, the Linker is a glycine/serine linker, and C₁ is a IL-2 mutein fused or linked to a Fc protein in either the N-terminal or C-terminal orientation; and

[0553] the second chain comprises:

[0554] V_{L}-L_{c}, wherein V_{L} is a variable light chain domain that binds to the target cell with the V_{H} domain of the first chain, and the Lc domain is a light chain CK domain.

139. The therapeutic compound of embodiment 138, wherein the VH and VL domain are anti-MAdCAM variable domains that bind to MAdCAM expressed on a cell.
140. The therapeutic compound of embodiment 138 or 139, wherein the IL-2 mutein comprises a mutation at a position that corresponds to position 53, 56, 80, or 118 of SEQ ID NO: 6.
141. The therapeutic compound of embodiment 140, wherein the mutation is a L to I mutation at position 53, 56, 80, or 118.
142. The therapeutic compound of embodiments 140 or 141, wherein the mutein further comprises a mutation at a position that corresponds to position 69, 75, 88, and/or 125, or any combination thereof.
143. The therapeutic compound of embodiments 140 or 141, wherein the IL-2 mutein comprises a mutation selected from the group consisting of: at one of L53I, L56I, L80I, and L118I and the mutations of V69A, Q74P, N88D or N88R, and optionally C125A or C125S.
144. The therapeutic compound of embodiment 143, wherein the IL-2 mutein comprises a L53I mutation.
145. The therapeutic compound of embodiment 143, wherein the IL-2 mutein comprises a L56I mutation.
146. The therapeutic compound of embodiment 143, wherein the IL-2 mutein comprises a L80I mutation.
147. The therapeutic compound of embodiment 143, wherein the IL-2 mutein comprises a L118I mutation.
148. The therapeutic compound of embodiment 143, wherein the IL-2 mutein does not comprises any other mutations.
149. The therapeutic compound of any one of embodiments 138-148, wherein the Fc protein comprises L247A, L248A, and G250A mutations or a L234A mutation, a L235A mutation, and/or a G237A mutation according to KABAT numbering.
150. The therapeutic compound of any one of embodiments 138-149, wherein the Linker comprises a sequence of GGGGSGGGGSGGGGS (SEQ ID NO: 30) or GGGGSGGGGSGGGGSGGGGS (SEQ ID NO: 22).
151. The therapeutic compound of any one of embodiments 138-149, wherein the polypeptide comprises a Fc peptide comprising a sequence described herein.
152. The therapeutic compound of any of embodiments 81-84, wherein:
one of R1, R2, R3 and R4 comprises an anti-BCR antibody molecule, e.g., an antagonistic anti-BCR antibody molecule, one comprises an anti FCRL antibody molecule, and one comprises specific targeting moiety.
153. The therapeutic compound of embodiment 152, wherein:
the anti-FCRL molecule comprises: an anti-FCRL antibody molecule, e.g., an agonistic anti-FCRL antibody molecule, directed to FCRL1, FCRL2, FCRL3, FCRL4, FCRL5, or FCRL6.
154. The therapeutic compound of any of embodiments 81-84, wherein:
R1, R2, R3 and R4 each independently comprise:
i) an effector binding/modulating moiety, e.g., an ICIM binding/modulating moiety, an IIC binding/modulating moiety, or an SM binding/modulating moiety, that minimizes or inhibits T cell activity, expansion, or function (a T cell effector binding/modulating moiety);
ii) an effector binding/modulating moiety, e.g., an ICIM binding/modulating moiety, an IIC binding/modulating moiety, or an SM binding/modulating moiety, that minimizes or inhibits B cell activity, expansion, or function (a B cell effector binding/modulating moiety);
iii) a specific targeting moiety; or
iv) is absent; provided that, a T cell effector binding/modulating moiety, a B cell effector binding/modulating moiety, and a specific targeting moiety are present.
155. The therapeutic compound of embodiment 154, wherein:
one of R1, R2, R3, and R4 comprises an agonistic anti-PD-1 antibody and one comprises an HLA-G molecule.
156. The therapeutic compound embodiments 154-155, wherein:
one of R1, R2, R3, and R4 comprises an SM binding/modulating moiety, e.g., a CD39 molecule or a CD73 molecule.
157. The therapeutic compound of any of embodiments 154-156, wherein:
one of R1, R2, R3, and R4 comprises an entity that binds, activates, or maintains, a regulatory immune cell, e.g., a Treg cell or a Breg cell.
158. The therapeutic compound of any of embodiments 154-157, wherein:
one of R1, R2, R3, and R4 comprises an agonistic anti-PD-1 antibody or one comprises an HLA-G molecule.
159. The therapeutic compound of embodiment 158, wherein:
one of R1, R2, R3, and R4 comprises an agonistic anti-PD-1 antibody, one comprises an HLA-G molecule, and one comprises CD39 molecule or a CD73 molecule.
160. The therapeutic compound of any of embodiments 1-159, wherein the effector binding/modulating moiety comprises a polypeptide.
161. The therapeutic compound of any of embodiments 1-160, wherein the effector binding/modulating moiety comprises a polypeptide having at least 5, 10, 20, 30, 40, 50, 150, 200 or 250 amino acid residues.
162. The therapeutic compound of any of embodiments 1-161, wherein the effector binding/modulating moiety has a molecular weight of 5, 10, 15, 20, or 40 Kd.
163. The therapeutic compound of any of embodiments 1-162, wherein the effector binding/modulating moiety does not comprise an inhibitor of the expression of apolipoprotien CIII, protein kinase A, Src kinase, or Beta1 integrin.
164. The therapeutic compound of any of embodiments 1-162, wherein the effector binding/modulating moiety does not comprise an inhibitor of the activity of apolipoprotien CIII, protein kinase A, Src kinase, or Beta1 integrin.
165. The therapeutic compound of any of embodiments 1-163, wherein the therapeutic compound does not specifically target a tissue selected from lung, skin, pancreas, retina, prostate, ovary, lymph node, adrenal gland, liver or gut tissue.
166. The therapeutic compound of any of embodiments 1-163, wherein the therapeutic compound does not specifically target tubular cells, e.g., proximal tubular epithelial cells
167. The therapeutic compound of any of embodiments 1-163, wherein the therapeutic compound does not specifically target TIE-2, APN, TEM4, TEM6, ICAM-1, nucleolin P2Z receptor, Trk-A, FLJ10849, HSPA12B, APP, or OX-45.
168. The therapeutic compound of any of embodiments 1-163, wherein the therapeutic compound does not specifically target a luminally expressed protein.
169. The therapeutic compound of any of embodiments 1-163, wherein the donor target does not comprise a heart specific target.
170. The therapeutic compound of any of embodiments 1-163, wherein the therapeutic compound does not specifically target lung tissue.
171. The therapeutic compound of any of embodiments 1-163, wherein the therapeutic compound does not specifically target kidney tissue.
172. The therapeutic compound of any of embodiments 1-163, wherein the therapeutic compound does not specifically pancreas lung tissue.
173. The therapeutic compound of any of embodiments 1-163, wherein the therapeutic compound does not specifically target gut tissue.
174. The therapeutic compound of any of embodiments 1-163, wherein the therapeutic compound does not specifically target prostate tissue.
175. The therapeutic compound of any of embodiments 1-163, wherein the therapeutic compound does not specifically target brain tissue.
176. The therapeutic compound of any of embodiments 1-163, wherein the therapeutic compound does not specifically target CD71.
177. The therapeutic compound of any of embodiments 1-163, wherein the therapeutic compound does not specifically target CD90.
178. The therapeutic compound of any of embodiments 1-163, wherein the therapeutic compound does not specifically target MAdCAM.
179. The therapeutic compound of any of embodiments 1-163, wherein the therapeutic compound does not specifically target albumin.
180. The therapeutic compound of any of embodiments 1-163, wherein the therapeutic compound does not specifically target carbonic anhydrase IV.
181. The therapeutic compound of any of embodiments 1-163, wherein the therapeutic compound does not specifically target ZG16-p.
182. The therapeutic compound of any of embodiments 1-163, wherein the therapeutic compound does not specifically target dipeptidyl peptidase IV.
183. The therapeutic compound of any of embodiments 1-163, wherein the therapeutic compound does not specifically target the luminal surface of a vascular endothelial cell membrane.
184. The therapeutic compound of any of embodiments 1-163, wherein the therapeutic compound does not specifically target heart tissue.
185. The therapeutic compound of any of embodiments 1-163, wherein the therapeutic compound does not specifically target a tumor, solid tumor, or the vascular of a solid tumor.
186. The therapeutic compound of any of embodiments 1-163, wherein the therapeutic compound does not specifically target skin tissue.
187. The therapeutic compound of any of embodiments 1-163, wherein the therapeutic compound does not specifically target epidermal tissue.
188. The therapeutic compound of any of embodiments 1-163, wherein the therapeutic compound does not specifically target the basement membrane.
189. The therapeutic compound of any of embodiments 1-163, wherein the therapeutic compound does not specifically target a Dsg polypeptide.
190. The therapeutic compound of any of embodiments 1-163, wherein the therapeutic compound does not specifically target Dsg1.
191. The therapeutic compound of any of embodiments 1-163, wherein the therapeutic compound does not specifically target Dsg3.
192. The therapeutic compound of any of embodiments 1-163, wherein the therapeutic compound does not specifically target BP180.
193. The therapeutic compound of any of embodiments 1-163, wherein the therapeutic compound does not specifically target desmoglein.
194. The therapeutic compound of any of embodiments 1-163, wherein the therapeutic compound does not comprise a complement modulator, e.g., a compliment inhibitor, such as, but not limited to, those described in U.S. Pat. No. 8,454,963, which is hereby incorporated by reference in its entirety.
195. The therapeutic compound of any of embodiments 1-163, wherein the therapeutic compound does not comprise an imaging agent.
196. The therapeutic compound of any of embodiments 1-163, wherein the therapeutic compound does not comprise an imaging agent selected from the group of: a radioactive agent, a radioisotope, a radiopharmaceutical, a contrast agent, a nanoparticle; an enzyme, a prosthetic group, a fluorescent material, a luminescent material, and a bioluminescent material, such as, but not limited to, those described in U.S. Pat. No. 8,815,235, which is hereby incorporated by reference in its entirety.
197. The therapeutic compound of any of embodiments 1-163, wherein the therapeutic compound does not comprise a radionuclide, such as, but not limited to, those described in U.S. Pat. No. 6,232,287, which is hereby incorporated by reference in its entirety.
198. The therapeutic compound of any of embodiments 1-163, which is not internalized by a donor cell to which it binds.
199. The therapeutic compound of any of embodiments 1-163, wherein the therapeutic compound does not enter the cell which is targeted by the specific targeting moiety.
200. The therapeutic compound of any of embodiments 1-163, wherein the therapeutic compound does not kill the cell which is targeted by the specific targeting moiety.
201. The therapeutic compound of any of embodiments 1-163, wherein the therapeutic compound does not enter the cell to which the effector binding/modulating moiety binds.
202. The therapeutic compound of any of embodiments 1-163, wherein the therapeutic compound does not kill the cell to which the effector binding/modulating moiety binds.
203. The therapeutic compound of any of embodiments 1-163, wherein the therapeutic compound does not comprise an autoantigenic peptide or polypeptide.
204. The therapeutic compound of any of embodiments 1-163, wherein the therapeutic compound does not comprise an autoantigenic peptide or polypeptide, e.g., does not comprise a peptide or polypeptide against which the subject has autoantibodies.
205. The therapeutic compound of any of embodiments 1-163, wherein the therapeutic compound does not comprise an antibody molecule derived from a mammal, e.g., a human, having an autoimmune disorder.
206. The therapeutic compound of any of embodiments 1-163, wherein the therapeutic compound does not comprise an antibody molecule derived from a mammal, e.g., a human, having acute mucocutaneous PV.
207. The therapeutic compound of any of embodiments 1-163, wherein the therapeutic compound does not comprise an antibody molecule derived from a mammal, e.g., a human, having Goodpasture's Disease.
208. The therapeutic compound of any of embodiments 1-163, wherein the therapeutic compound does not comprise an antibody molecule derived from a mammal, e.g., a human, having pemphigus vulgaris.
209. The therapeutic compound of any of embodiments 1-208, comprising a donor specific targeting moiety.
210. The therapeutic compound of any of embodiments 209, that localizes preferentially to an implanted donor tissue, as opposed to tissue of a recipient.
211. The therapeutic compound of embodiments 209-210, wherein, the donor specific targeting moiety provides site-specific immune privilege for a transplant tissue, e.g., an organ, from a donor.
212. The therapeutic compound of embodiments 209-211, wherein the donor specific targeting moiety binds to a product, e.g., a polypeptide, of an allele present at a locus in the donor, which allele is not present at the locus in the recipient
213. The therapeutic compound of any of embodiments 209-212, wherein, the donor specific targeting moiety preferentially binds to an allele of a gene expressed on donor tissue, e.g., a transplant tissue, e.g., an organ, as compared with an allele of the gene expressed on subject tissue.
214. The therapeutic compound of embodiments 209-213, wherein, the donor specific targeting moiety has a binding affinity for an allele of a gene expressed on donor tissue, e.g., a transplant tissue, e.g., an organ, which is at least 2, 4, 5, 10, 50, 100, 500, 1,000, 5,000, or 10,000 fold greater than its affinity for an allele of the gene expressed on subject tissue.
215. The therapeutic compound of any of embodiments 209-214, wherein the donor specific targeting moiety binds to the product, e.g., a polypeptide, of an allele present at a locus in the donor, which allele is not present at the locus in the recipient.
216. The therapeutic compound of any one of embodiments 209-215, wherein the binding is sufficiently specific that, e.g., at a clinically effective dose of the therapeutic compound, unwanted, substantial, or clinically unacceptable, systemic immune suppression occurs.
217. The therapeutic compound of any one of embodiments 209-216, wherein the therapeutic compound accumulates at the target site, e.g., binding of the donor specific targeting moiety to results in accumulation of the therapeutic compound at the target site.
218. The therapeutic compound of any one of embodiments 209-217, wherein the donor specific targeting moiety binds a product of an allele of a locus selected from Table 2, e.g., the HLA locus, e.g., the HLA-A, HLA-B, HLA-C, HLA-DP, HLA-DQ or HLA-DR locus, which allele is present in the donor but not the recipient. HLA-A, HLA-B, HLA-C, HLA-DP, HLA-DQ or HLA-DR locus.
219. The therapeutic compound of any one of embodiments 209-218, wherein the donor specific targeting moiety binds an allele of HLA A, an allele of HLA-B, an allele of HLA-C, an allele of HLA-DP, an allele of HLA-, or an allele of HLA-.
220. The therapeutic compound of any one of embodiments 209-219, wherein the therapeutic compound is suitable for treating a subject that has, will have, or is in need of, a transplant.
221. The therapeutic compound of embodiment 220, wherein the transplant comprises all or part of an organ, e.g., a liver, kidney, heart, pancreas, thymus, skin or lung.
222. The therapeutic compound of any one of embodiments 209-221, wherein the donor specific targeting moiety comprises an antibody molecule.
223. The therapeutic compound of any one of embodiments 209-221, wherein the donor specific targeting moiety comprises a target specific binding polypeptide, or a target ligand binding molecule.
224. The therapeutic compound of any one of embodiments 1-223, comprising a tissue specific targeting moiety.
225. The therapeutic compound of embodiment 224, wherein the tissue specific targeting moiety is a molecule that specifically binds to MAdCAM.
226. The therapeutic compound of embodiment 224, wherein the tissue specific targeting moiety is an antibody that specifically binds to MAdCAM.
227. The therapeutic compound of any one of embodiments, 224-226, wherein the therapeutic compound is suitable for treating a subject having, or is at risk, or elevated risk, for having, an autoimmune disorder, e.g., an autoimmune disorder described herein.
228. The therapeutic compound of any of embodiments 224-227, wherein the therapeutic compound accumulates at the target site, e.g., binding of the tissue specific targeting moiety results in accumulation of the therapeutic compound at the target site.
229. The therapeutic compound of any of embodiments 224-228, wherein the therapeutic compound which localizes, preferentially to a target tissue, as opposed to other tissue of a subject.
230. The therapeutic compound of any of embodiments 224-229, wherein the therapeutic compound provides site-specific immune privilege for a subject target tissue, e.g., a target tissue undergoing, or at risk, or elevated risk, for, unwanted immune attack, e.g., in an autoimmune disorder.
231. The therapeutic compound of any of embodiments 224-229, wherein the tissue specific targeting moiety, as a component of the therapeutic compound, preferentially binds a subject target tissue undergoing unwanted immune attack, e.g., in an autoimmune disorder.
232. The therapeutic compound of any of embodiments 224-231, wherein a tissue specific targeting moiety binds to the product, e.g., a polypeptide, which is not present outside the target tissue, or is present at sufficiently low levels that, at therapeutic concentrations of therapeutic molecule, unacceptable levels of immune suppression are absent or substantially absent.
233. The therapeutic compound of any of embodiments 224-232, wherein, the tissue specific targeting moiety binds a product, or site on a product, which is more abundant in target tissue than in non-target tissue.
234. The therapeutic compound of any of embodiments 224-233, wherein, therapeutic compound binds a product, or a site on a product, that is present or expressed substantially exclusively on target tissue.
235. The therapeutic compound of any of embodiments 224-234, wherein the product, or site on a product, to which the specific targeting moiety binds, is sufficiently limited to the target tissue, that at therapeutically effective level of therapeutic compound, the subject does not suffer an unacceptable level, e.g., a clinically significant level, of systemic immune suppression.
236. The therapeutic compound of any of embodiments 224-235, wherein the therapeutic compound, preferentially binds to a target tissue or target tissue antigen, e.g., has a binding affinity for the target tissue or antigen that is greater for target antigen or tissue, e.g., at least 2, 4, 5, 10, 50, 100, 500, 1,000, 5,000, or 10,000 fold greater, than its affinity for than for non-target tissue or antigen present outside the target tissue.
237. The therapeutic compound of any of embodiments 224-236, wherein the tissue specific targeting moiety binds to a product, e.g., a polypeptide product, or site on a product, present at a preselected site, e.g., a site of unwanted immune response in an autoimmune disorder.
238. The therapeutic compound of any of embodiments 224-237, wherein therapeutic compound is suitable for the treatment of a subject having, or at risk, or elevated risk, for having, type 1 diabetes.
239. The therapeutic compound of any of embodiments 224-238, wherein the target tissue comprises pancreatic tissue, e.g., pancreatic islets or pancreatic beta cells, gut tissue (e.g. gut endothelial cells), kidney tissue (e.g. kidney epithelial cells), or liver tissue (e.g. liver epithelial cells).
240. The therapeutic compound of any of embodiments 224-239, wherein the effector binding/modulating moiety or targeting moiety binds a polypeptide selected from those described herein, such as those listed in Table 3, e.g., SEZ6L2, LRP11, DISP2, SLC30A8, FXYD2, TSPAN7, or TMEM27.
241. The therapeutic compound of any of embodiments 224-236, wherein therapeutic compound is suitable for the treatment of a subject having, or at risk, or elevated risk, for having, multiple sclerosis.
242. The therapeutic compound of embodiment 241, wherein the target tissue comprises CNS tissue, myelin sheath, or myelin sheath of oligodendrocytes.
243. The therapeutic compound of any of embodiments 241-242, wherein the effector binding/modulating moiety or targeting moiety binds a polypeptide selected from those described herein and including, but not limited to, Table 3, e.g., MOG, PLP, or MBP.
244. The therapeutic compound of any of embodiments 224-236, wherein therapeutic compound is suitable for the treatment of a subject having, or at risk, or elevated risk, for having, cardiomyositis.
245. The therapeutic compound of embodiment 244, wherein the target tissue comprises cardiomyocytes, monocytes, macrophages, or myeloid cells.
246. The therapeutic compound of embodiments 244-245, wherein the effector binding/modulating moiety binds or the targeting moiety a polypeptide as described herein, including, but not limited to those selected from Table 3, e.g., SIRPA (CD172a).
247. The therapeutic compound of any of embodiments 224-236, wherein therapeutic compound is suitable for the treatment of a subject having, or at risk, or elevated risk, for having, inflammatory bowel disease, autoimmune hepatitis (AIH); Primary Sclerosing Cholangitis (PSC); Primary Biliary Sclerosis; (PBC); or transplant.
248. The therapeutic compound of any of embodiments 224-236, wherein the subject with has, is at risk or elevated risk for having Crohn's disease or ulcerative colitis.
249. The therapeutic compound of embodiments 247 or 248, wherein the target tissue comprises gut cells, such as gut epithelial cells or liver cells, such as liver epithelial cells.
250. The therapeutic compound of embodiments 247-249, wherein the effector binding/modulating moiety binds a polypeptide as described herein, including, but not limited to those selected from Table 3, e.g., PD-1.
251. The therapeutic compound of embodiments 247-249, wherein the targeting moiety binds a polypeptide as described herein, including, but not limited to MAdCAM.
252. The therapeutic compound of any of embodiments 224-236, wherein therapeutic compound is suitable for the treatment of a subject having, or at risk, or elevated risk, for having, rheumatoid arthritis.
253. The therapeutic compound of embodiment 252, wherein the target tissue comprises cardiomyocytes, monocytes, macrophages, or myeloid cells.
254. The therapeutic compound of embodiments 252 or 253, wherein the effector binding/modulating moiety or targeting moiety binds a polypeptide selected from Table 3, e.g., SIRPA (CD172a).
255. The therapeutic compound of any of embodiments 224-254, wherein the tissue specific targeting moiety comprises an antibody molecule.
256. The therapeutic compound of any of embodiments 224-254, wherein the tissue specific targeting moiety comprises a target specific binding polypeptide, or a target ligand binding molecule.
257. The therapeutic compound of any of embodiments 224-254, wherein the tissue specific targeting moiety comprises a target specific binding polypeptide binds to MAdCAM.
258. The therapeutic compound of any of embodiments 1-257, wherein the therapeutic compound binds a cell surface molecule of an immune effector cell, e.g., a T cell, B cell, NK cell, or other immune cell, which cell propagates a pro-immune response.
259. The therapeutic compound of any of embodiments 1-258, wherein the therapeutic compound reduces the ability of an immune effector cell, e.g., a T cell, B cell, NK cell, or other immune cell, to propagate a pro-immune response.
260. The therapeutic compound of any of embodiments 1-259, wherein the specific targeting moiety targets a mammalian target, e.g., a mammalian polypeptide, and the effector binding/modulating moiety binds/modulates a mammalian immune component, e.g., a human immune cell, e.g., a mammalian B cell, T cell, or macrophage.
261. The therapeutic compound of any of embodiments 1-260, wherein the specific targeting moiety targets a human target, e.g., a human polypeptide, and the effector binding/modulating moiety binds/modulates a human immune component, e.g., a human immune cell, e.g., a human B cell, T cell, or macrophage.
262. The therapeutic compound of any of embodiments 1-261, wherein the therapeutic compound is configured for use in a human.
263. The therapeutic compound of any of embodiments 1-260, wherein the therapeutic compound is configured for use in a non-human mammal.
264. The therapeutic compound of any of embodiments 1-263, wherein the therapeutic compound, e.g., the effector binding/modulating moiety, comprises a PD-1 agonist.
265. The therapeutic compound of any of the preceding embodiments, wherein the therapeutic compound comprises a IL-2 mutein of SEQ ID NO: 15, wherein the mutein comprises a mutation at position 73, 76, 100, or 138.
266. The therapeutic compound of embodiment 265, wherein the mutation is a L to I mutation at position 73, 76, 100, or 138.
267. The therapeutic compound of embodiments 265 or 266, wherein the IL-2 mutein further comprises a mutation at one or more of positions 49, 51, 55, 57, 68, 89, 91, 94, 108, and 145.
268. The therapeutic compound of any of embodiments 265-267, wherein the mutein further comprises a mutation at one or more of positions E35, H36, Q42, D104, E115, or Q146 or 1, 2, 3, 4, 5, or each of E35, H36, Q42, D104, E115, or Q146 is wild-type.
269. The therapeutic compound of embodiment 268, wherein the mutation is one or more of E35Q, H36N, Q42E, D104N, E115Q, or Q146E.
270. The therapeutic compound of any one of embodiments 265-269, wherein the IL-2 mutein comprises a N49S mutation.
271. The therapeutic compound of any one of embodiments 265-270, wherein the IL-2 mutein comprises a Y51S or a Y51H mutation.
272. The therapeutic compound of any one of embodiments 265-271, wherein the IL-2 mutein comprises a K55R mutation.
273. The therapeutic compound of any one of embodiments 265-272, wherein the IL-2 mutein comprises a T57A mutation.
274. The therapeutic compound of any one of embodiments 265-272, wherein the IL-2 mutein comprises a K68E mutation, V89A (V69A) mutation, a N91R (N71R) mutation, a Q94P or Q74P mutation, a (N88D) or a N108R (N88R) mutation, a C145A (C125A) or C145S (C125S) mutation.
275. The therapeutic compound of any one of embodiments 265-274, wherein the therapeutic compound comprises a IL-2 mutein of SEQ ID NO: 6, wherein the mutein comprises a mutation at position 53, 56, 80, or 118 and one or more of the mutations recited in embodiments 265-274.
276. The therapeutic compound of any one of embodiments 265-275, wherein the IL-2 mutein is fused or linked to a Fc peptide.
277. The therapeutic compound of embodiment 276 wherein the Fc peptide comprise a mutation at one or more of positions of L234, L247, L235, L248, G237, and G250 (EU numbering).
278. A method of treating a subject with inflammatory bowel disease, the method comprising administering a therapeutic compound of any of embodiments 1-277 to the subject to treat the inflammatory bowel disease.
279. The method of embodiment 278, wherein the subject with inflammatory bowel disease has Crohn's disease.
280. The method of embodiment 278, wherein the subject with inflammatory bowel disease has ulcerative colitis.
281. A method of treating a subject with auto-immune hepatitis, the method comprising administering a therapeutic compound of any of embodiments 1-277 to the subject to treat the auto-immune hepatitis.
282. A method of treating primary sclerosing cholangitis the method comprising administering a therapeutic compound of any of embodiments 1-277 to the subject to treat the primary sclerosing cholangitis.
283. A method of treating Type 1 diabetes the method comprising administering a therapeutic compound of any of embodiments 1-277, thereby treating the subject to treat the Type 1 diabetes.
284. A method of treating a transplant subject comprising administering a therapeutically effective amount of a therapeutic compound of any of embodiments 1-277 to the subject, thereby treating a transplant (recipient) subject.
285. A method of treating GVHD in a subject having a transplanted a donor tissue comprising administering a therapeutically effective amount of a therapeutic compound of any of embodiments 1-277 to the subject.
286. The method of embodiment 285, wherein the therapeutic compound is administered to the subject: prior to receiving the transplant; prior to developing a symptom of GVHD; after or concurrent with receiving the transplant; or after or concurrent with developing a symptom of GVHD.
287. A method of treating a subject having, or at risk, or elevated risk, for having, an autoimmune disorder, comprising administering a therapeutically effective amount of a therapeutic compound of any embodiments 1-277, thereby treating the subject.
288. The method of embodiment 287, wherein the subject has received, will receive, or is in need of, allograft donor tissue.
289. The method of any of embodiments 287-288, wherein the donor tissue comprises a solid organ, e.g., a liver, kidney, heart, pancreas, thymus, or lung.
290. The method of any of embodiments 287-288, wherein the donor tissue comprises all or part of an organ, e.g., a liver, kidney, heart, pancreas, thymus, or lung.
291. The method of any of embodiments 287-288, wherein the donor tissue comprises skin.
292. The method of any of embodiments 287-288, wherein the donor tissue does not comprises skin.
293. The method of any of embodiments 287-292, wherein the donor tissue presents or expresses a product of an allele of a locus locus, which allele is not present or expressed in the subject.
294. The method of any of embodiments 287-292, wherein the donor tissue presents or expresses a product of an allele of a locus selected from Table 2, e.g., the HLA locus, e.g., the HLA-A, HLA-B, HLA-C, HLA-DP, HLA-DQ or HLA-DR locus, which allele is not present or expressed in the subject.
295. The method of any of embodiments 287-294, comprising introducing the transplant tissue into the subject.
296. The method of any of embodiments 278-295, comprising monitoring the subject for immune cell inactivation (e.g., to monitor unwanted agonization of an immune inhibitory checkpoint molecule) at a site distant from the target site, e.g., in the peripheral circulation or the lymphatic system.
297. The method of any of embodiments 278-296, comprising monitoring the subject for immune cell activation (e.g., to monitor unwanted antagonization of an immune inhibitory checkpoint molecule) at a site distant from the target site, e.g., in the peripheral circulation or the lymphatic system.
298. The method of any of embodiments 278-297, wherein responsive to the result of monitoring, selecting a course of treatment for the subject, e.g., increasing the dose of the therapeutic compound, decreasing the dose of the therapeutic compound, continuing treatment with the therapeutic compound without a change in dose.
299. The method of any of embodiments 278-298, comprising administering the compound of embodiments 1-277, to the recipient.
300. The method of any of embodiments 278-298, wherein administering comprises systemic administration, e.g., to the peripheral circulatory system.
301. The method of any of embodiments 278-298, wherein administering comprises local administration, e.g., to the target tissue, the donor tissue or the site of at which the target tissue or the donor tissue is, or will be located.
302. The method of any of embodiments 301, comprising administering the therapeutic compound to the recipient prior to introduction of the donor tissue into the recipient.
303. The method of any of embodiments 301, comprising administering the therapeutic compound, to the recipient after introduction of the donor tissue into the recipient.
304. The method of any of embodiments 295, comprising administering the therapeutic compound to the recipient concurrent with introduction of the donor tissue into the recipient.
305. The method of embodiment 295, comprising contacting the therapeutic compound with the donor tissue prior to introduction of the donor tissue into the recipient.
306. The method of any of embodiments 295, comprising providing the therapeutic compound to the subject, wherein the transplant tissue has been contacted with therapeutic compound prior to introduction into the subject.
307. The method of any of embodiments 295, comprising contacting the therapeutic compound with the donor tissue after introduction of the donor tissue into the recipient, e.g., by local administration to the donor tissue.
308. The method of any of embodiments 278-307, comprising administering a therapeutic compound as provided for herein such that therapeutic levels are present for at least 1, 5, 10, 14, or 28 days, for example, consecutive or non-consecutive days.
309. The method of any of embodiments 278-308, wherein the subject does not receive a non-targeted immune suppressive agent.
310. The method of any of embodiments 278-308, wherein for the subject has not received a non-targeted immune suppressive agent for at least 1, 15, 30, 60, or 90 days prior to the initial administration of the therapeutic compound.
311. The method of any of embodiments 295, wherein the subject has not received a non-targeted immune suppressive agent for at least 1, 15, 30, 60, or 90 days prior to introduction of the transplant tissue.
312. The method of any of embodiments 278-311, wherein the subject does not receive a non-targeted immune suppressive agent for at least 1, 15, 30, 60, 90, or 180 days after the initial administration of the therapeutic compound.
313. The method of any of embodiments 278-311, wherein the subject does not receive a non-targeted immune suppressive agent for at least 1, 15, 30, 60, 90, or 180 days after introduction of the transplant tissue.
314. The method of any of embodiments 278-313, comprising administering a non-targeted immune suppressive agent to the subject.
315. The method of any of embodiments 278-314, wherein for the subject receives a non-targeted immune suppressive agent for at least 1, 15, 30, 60, or 90 days prior to the initial administration of the therapeutic compound.
316. The method of embodiment 295, wherein the subject receives a non-targeted immune suppressive agent for at least 1, 15, 30, 60, or 90 days prior to introduction of the transplant tissue.
317. The method of embodiment 316, wherein the subject receives a non-targeted immune suppressive agent for at least 1, 15, 30, 60, 90 or 180 days after the initial administration of the therapeutic compound.
318. The method of any of embodiments 278-317, wherein the subject receives a non-targeted immune suppressive agent for at least 1, 15, 30, 60, 90 or 180 days after introduction of the transplant tissue.
319. The method of any of embodiments 278-317, wherein for the subject receives a non-targeted immune suppressive agent prior to the initial administration of the therapeutic compound but for no more than 1, 15, 30, 60, 90 or 180 days.
320. The method of embodiment 295, wherein the subject receives a non-targeted immune suppressive agent prior to introduction of the transplant tissue but for no more than 1, 15, 30, 60, 90 or 180 days.
321. The method of any of embodiments 278-320, wherein the subject receives a non-targeted immune suppressive agent after the initial administration of the therapeutic compound but for no more than 1, 15, 30, 60, 90 or 180 days.
322. The method of embodiment 295, wherein the subject receives a non-targeted immune suppressive agent after introduction of the transplant tissue but for no more than 1, 15, 30, 60, 90 or 180 days.
323. The method of embodiment 295, wherein the subject is monitored for rejection of the transplant tissue.
324. The method of any of embodiments 278-323, a dosage of a non-targeted immune suppressive agent is selected, or wherein responsive to the monitoring, a dosage of a non-targeted immune suppressive agent is selected.
325. The method of embodiment 324, wherein the dosage is administered.
326. The method of embodiment 325, wherein the selected dosage is zero, i.e., a non-targeted immune suppressive agent is not administered.
327. The method of embodiment 325, wherein the selected dosage is non-zero, i.e., a non-targeted immune suppressive agent is administered.
328. The method of embodiment 325, wherein the dosage is less than what would be administered in the absence of administration of a therapeutic compound.
329. The method of any of embodiments 278-328, wherein the subject is a mammal, e.g., a non-human mammal.
330. The method of any of embodiments 278-328, wherein the subject is a human.
331. The method of embodiment 295, wherein the donor and subject are mismatched at an HLA locus, e.g., a major or minor locus.
332. The method of embodiment 331, wherein the subject is a mammal, e.g., a non-human mammal.
333. The method of embodiment 331, wherein the subject is a human.
334. A method of treating a subject having, or at risk, or elevated risk, for having, an autoimmune disorder, comprising administering a therapeutically effective amount of a therapeutic compound of any embodiments 1-277, thereby treating the subject.
335. The method of embodiment 334, wherein provision of the therapeutic compound is initiated prior to the onset, or prior to identification of onset, of symptoms of the autoimmune disorder.
336. The method of any of embodiments 334-335, wherein provision of the therapeutic compound is initiated after onset, or after identification of onset, of symptoms of the autoimmune disorder.
337. The method of embodiments 334-336, wherein autoimmune disorder comprises type 1 diabetes.
338. The therapeutic compound of any of embodiments 334-337, wherein the target tissue comprises pancreatic islets or pancreatic beta cells, gut tissue (e.g. gut endothelial cells), kidney tissue (e.g. kidney epithelial cells), or liver tissue (e.g. liver epithelial cells).
339. The therapeutic compound of any of embodiments 334-338, wherein the effector binding/modulating moiety or targeting moiety binds a polypeptide selected from Table 3, e.g., MAdCAM, OAT1, OCT, DPP6, SEZ6L2, LRP11, DISP2, SLC30A8, FXYD2, TSPAN7, or TMEM27 polypeptide.
340. The method of any of embodiments 334-339, wherein provision of the therapeutic compound is initiated prior to the onset, or prior to identification of onset, of symptoms of type 1 diabetes.
341. The method of any of embodiments 334-340, wherein provision of the therapeutic compound is initiated prior to, or prior to identification of the subject having a preselected characteristic or symptom.
342. The method of any of embodiments 334-341, wherein provision of the therapeutic compound is initiated after onset, or after identification of onset, of symptoms of type 1 diabetes.
343. The method of any of embodiments 334-342, wherein provision of the therapeutic compound is initiated after, or after identification of the subject having a preselected characteristic or symptom.
344. The method of any of embodiments 334-343, wherein the therapeutic compound is a therapeutic compound of any of embodiments 1-277
345. The method of any of embodiments 334-339, wherein therapeutic compound is suitable for the treatment of a subject having, or at risk, or elevated risk, for having, multiple sclerosis.
346. The method of embodiment 345, wherein the target tissue comprises CNS tissue, myelin sheath, or myelin sheath of oligodendrocytes.
347. The method of any of embodiments 345 or 346, wherein the effector binding/modulating moiety or targeting moiety binds a polypeptide selected from Table 3, e.g., a MOG, PLP, or MBP polypeptide.
348. The method of any of embodiments 345-347, wherein provision of the therapeutic compound is initiated prior to the onset, or prior to identification of onset, of symptoms of multiple sclerosis.
349. The method of any of embodiments 345-347, wherein provision of the therapeutic compound is initiated prior to, or prior to identification of the subject a preselected characteristic or symptom.
350. The method of any of embodiments 345-347, wherein provision of the therapeutic compound is initiated after onset, or after identification of onset, of symptoms of multiple sclerosis.
351. The method of any of embodiments 345-347, wherein provision of the therapeutic compound is initiated after, or after identification of the subject having a preselected characteristic or symptom.
352. The method of any of embodiments 345-351, wherein the therapeutic compound is a therapeutic compound of any of embodiments 1-277.
353. The method of any of embodiments 334-339, wherein the therapeutic compound is suitable for the treatment of a subject having, or at risk, or elevated risk, for having, cardiomyositis.
354. The method of embodiment 353, wherein the target tissue comprises cardiomyocytes, monocytes, macrophages, or myeloid cells.
355. The method of embodiments 353 or 354, wherein the effector binding/modulating moiety or targeting moiety binds a polypeptide selected from Table 3, e.g., a SIRPA (CD172a) polypeptide.
356. The method of any of embodiments 353-355, wherein provision of the therapeutic compound is initiated prior to the onset, or prior to identification of onset, of symptoms of cardiomyositis.
357. The method of any of embodiments 353-355, wherein provision of the therapeutic compound is initiated prior to, or prior to identification of the subject having a preselected characteristic or symptom.
358. The method of any of embodiments 353-355, wherein provision of the therapeutic compound is initiated after onset, or after identification of onset, of symptoms of cardiomyositis.
359. The method of any of embodiments 353-355, wherein provision of the therapeutic compound is initiated after, or after identification of the subject having a preselected characteristic or symptom.
360. The method of any of embodiments 353-359, wherein the therapeutic compound is a therapeutic compound of any of embodiments 1-277.
361. The method of any of embodiments 334-339, wherein therapeutic compound is suitable for the treatment of a subject having, or at risk, or elevated risk, for having, rheumatoid arthritis.
362. The method of embodiment 361, wherein the target tissue comprises cardiomyocytes, monocytes, macrophages, or myeloid cells.
363. The method of embodiments 361 or 362, wherein the effector binding/modulating moiety or targeting moiety binds a polypeptide selected from Table 3, e.g., a SIRPA (CD172a) polypeptide.
364. The method of embodiments 361-363, wherein provision of the therapeutic compound is initiated prior to the onset, or prior to identification of onset, of symptoms of rheumatoid arthritis.
365. The method of embodiments 361-363, wherein provision of the therapeutic compound is initiated prior to, or prior to identification of the subject having a preselected characteristic or symptom.
366. The method of embodiments 361-363, wherein provision of the therapeutic compound is initiated after onset, or after identification of onset, of symptoms of rheumatoid arthritis.
367. The method of embodiments 361-363, wherein provision of the therapeutic compound is initiated after, or after identification of the subject having a preselected characteristic or symptom.
368. The method of embodiments 361-367, wherein the therapeutic compound is a therapeutic compound of any of embodiments 1-277.
369. The method of any of embodiments 278-368, comprising monitoring the subject for immune cell inactivation (e.g., to monitor unwanted agonization of an immune inhibitory checkpoint molecule) at a site distant from the target site, e.g., in the peripheral circulation or the lymphatic system.
370. The method of any of embodiments 278-369, comprising monitoring the subject for immune cell activation (e.g., to monitor unwanted antagonization of an immune inhibitory checkpoint molecule) at a site distant from the target site, e.g., in the peripheral circulation or the lymphatic system.
371. The method of any of embodiments 278-370, wherein responsive to the result of monitoring, selecting a course of treatment for the subject, e.g., increasing the dose of the therapeutic compound, decreasing the dose of the therapeutic compound, continuing treatment with the therapeutic compound without a change in dose.
372. The method of any of embodiments 278-371, wherein the subject monitored for autoimmune attack of the target tissue.
373. The method of embodiment 372, wherein responsive to the monitoring, a dosage of the therapeutic compound is selected.
374. The method of embodiment 373, wherein the dosage is administered.
375. The method of embodiment 372, wherein the selected dosage is zero, i.e., administration of therapeutic compound is ceased.
376. The method of embodiment 372, wherein the selected dosage is non-zero.
377. The method of embodiment 372, wherein the selected dosage is an increased dosage.
378. The method of embodiment 372, wherein the selected dosage is an reduced dosage.
379. The method of any of embodiments 278-378, wherein administering comprises systemic administration, e.g., to the peripheral circulatory system.
380. The method of any of embodiments 278-379, wherein administering comprises local administration, e.g., to the target tissue.
381. The method of any of embodiments 278-380, comprising administering a therapeutic compound provided herein such that therapeutic levels are present for at least 1, 5, 10, 14, or 28 days, e.g, consecutive or non-consecutive days.
382. The method of any of embodiments 278-381, wherein the subject is a mammal, e.g., a non-human mammal.
383. The method of any of embodiments 278-381, wherein the subject is a human.
384. A nucleic acid molecule or a plurality of nucleic acid molecules encoding a therapeutic compound of any of embodiments 1-277.
385. A vector or a plurality of vectors comprising the nucleic acid molecules of embodiment 384
386. A cell comprising the nucleic acid molecules of embodiment 384 or the vector of embodiment 385.
387. A method of making a therapeutic compound comprising culturing a cell of embodiment 386 to make the therapeutic compound.
388. A method of making a nucleic acid sequence encoding a therapeutic compound of any of embodiments 1-277, comprising

[0555] a) providing a vector comprising sequence encoding a targeting moiety and inserting into the vector sequence encoding an effector binding/modulating moiety to form a sequence encoding a therapeutic compound; or

[0556] b) providing a vector comprising sequence encoding an effector binding/modulating moiety and inserting into the vector sequence encoding a targeting moiety to form a sequence encoding a therapeutic compound,

[0557] thereby making a sequence encoding a therapeutic compound.

307. The method of embodiment 306, wherein the targeting moiety is selected in response to the need of a subject.
389. The method of embodiment 388, wherein the targeting moiety is selected in response to the need of a subject.
390. The method of embodiment 388 or 389, wherein the effector binding/modulating moiety is selected in response to the need of a subject.
391. The method of any of embodiments 388 or 389, further comprising expressing the sequence encoding the therapeutic compound to produce the therapeutic compound.
392. The method of any of embodiments 388-391, further comprising transferring the sequence, or a polypeptide made from the sequence, to another entity, e.g., a health care provider who will administer the therapeutic compound to a subject.
393. A method of treating a subject comprising:

[0558] acquiring, e.g., receiving from another entity, a therapeutic compound, or a nucleic acid encoding a therapeutic compound, made by the method of any of provided herein, but not limited to embodiments 388-392;

[0559] administering the therapeutic compound, or a nucleic acid encoding a therapeutic compound to the subject,

thereby treating the subject.
394. The method of embodiment 393, further comprising identifying the therapeutic compound, or nucleic acid encoding a therapeutic compound to another entity, e.g., the entity that will make the therapeutic compound, or nucleic acid encoding a therapeutic compound.
395. The method of embodiments 393 or 394, further comprising requesting the therapeutic compound, or nucleic acid encoding a therapeutic compound from another entity, e.g., the entity that made the therapeutic compound, or nucleic acid encoding a therapeutic compound.
396. The method of any of embodiments 393-395, wherein the subject has an autoimmune disorder and the therapeutic compound does not comprise an autoantigenic peptide or polypeptide characteristic of the autoimmune disorder, e.g., does not comprise a peptide or polypeptide against which the subject has autoantibodies.
397. The therapeutic compound of embodiment 97, wherein the compound has the formula from N-terminus to C-terminus:

A1-Linker A-A2-Linker B-A3 or A3-Linker A-A2-Linker B-A1,

wherein,

[0560] A1 and A3, each independently comprises the effector binding/modulating moiety, or the targeting moiety,

[0561] A2 comprises an Fc region, and

[0562] Linker A and Linker B, each are independent linkers.

398. The therapeutic compound of embodiment 397, wherein each of Linker A and Linker B comprises an independent linker.
399. The therapeutic compound of embodiment 397, wherein A1 is a anti-MAdCAM antibody and A3 is a IL2-mutein antibody.
400. The therapeutic compound of embodiment 397, wherein A1 or A3 is a PD-1 antibody.
401. The therapeutic compound of embodiment 397, wherein A2 comprises an Fc region.
402. The therapeutic compound of embodiment 397-401, wherein Linker A and Linker B, each independently are glycine/serine linkers.
403. The therapeutic compound of embodiment 397-402, wherein Linker A and Linker B, each independently comprises GGGGSGGGGSGGGGSGGGGS (SEQ ID NO: 22), GGGGSGGGGSGGGGS (SEQ ID NO: 30), GGGGSGGGGS (SEQ ID NO: 792), or GGGGS (SEQ ID NO: 23).

[0563] The following examples are illustrative, but not limiting, of the compounds, compositions and methods described herein. Other suitable modifications and adaptations known to those skilled in the art are within the scope of the following embodiments.

### EXAMPLES

### Example 1: HLA-Targeted PD-1 Agonizing Therapeutic Compounds

### Engineering of a HLA-Targeted PD-1-Agonizing Therapeutic Compounds.

[0564] Binding domains specific for HLA-A2 are obtained by cloning the variable regions of the Ig heavy and light chains from the BB7.2 hybridoma (ATCC) and converting into a single-chain Ab (scFv). Activity and specificity of the scFv can be confirmed by assessing binding of BB7.2 to HLA-A2 expressing cells in comparison to cells expressing other HLA-A alleles. The minimal PD-L1 residues required for PD-1 binding activity are identified by systematically evaluating the requirement of amino acids 3′ and 5′ of the PD-L1 IgV domain corresponding to amino acids 68-114. Expression constructs are designed and proteins synthesized and purified, with PD-1 binding activity tested by Biacore. The minimum essential amino acids required for PD-1 binding by the PD-L1 IgV domain are referred to as PD-L1-IgV. To generate a BB7.2 scFv and PD-L1-IgV bispecific molecule, a DNA fragment is synthesized encoding the bispecific single-chain antibody BB7.2×PD-L1-IgV with the domain arrangement VL_{BB7.2}-VH_{BB7.2}-PD-L1-IgV-IgG4 Fc and cloned into an expression vector containing a DHFR selection cassette.

[0565] Expression vector plasmid DNA is transiently transfected into 293T cells, and BB7.2×PD-L1-IgV bispecific antibodies are purified from supernatants using a protein A/G column. BB7.2×PD-L1-IgV bispecific antibody integrity is assessed by polyacrylamide gel. Binding of the BB7.2 scFv domain to HLA-A2 and PD-L1-IgV domain to PD-1 is assessed by ELISA and cell-based FACS assay.

[0566] The in vitro function of BB7.2×PD-L1-IgV bispecific antibodies is assessed using mixed lymphocyte reaction (MLR) assay. In a 96-well plate format, 100,000 irradiated human PBMCs from an HLA-A2⁺ donor are aliquoted per well and used as activators. HLA-A1⁻ responder T cells are then added together with increasing amounts of BB7.2×PD-L1-IgV bispecific antibody. The ability of responder T cells to proliferate over a period of 72 hours is assessed by BrdU incorporation, and with IFNg and IL2 cytokine production additionally evaluated in the co-culture supernatant as assessed by ELISA. BB7.2×PD-L1-IgV bispecific antibody is found to suppress MLR reaction as demonstrated by inhibiting HLA-A2⁻ responder T cell proliferation and cytokine production.

[0567] The in vivo function of BB7.2×PD-L1-IgV bispecific antibody is assessed using a murine mouse model of skin allograft tolerance. The C57BL/6-Tg(HLA-A2.1)1Enge/J (Jackson Laboratories, Bar Harbor Me.) strain of mouse is crossed with Balb/cJ, with F1 progeny expressing the HLA-A2.1 transgene and serving as allograft donors. C57BL/6J mice are shaved and surgically engrafted with skin removed from euthanized C57BL/6-Tg(HLA-A2.1)1Enge/J×Balb/cJ F1 mice. At the same time, host mice start receiving intraperitoneal injections of the BB7.2×PD-L1-IgV bispecific antibody engineered to contain a murine IgG1 Fc or BB7.2 only or PD-L1-IgV only controls. Skin allograft rejection or acceptance is monitored over a period of 30 days, wherein hosts were euthanized and lymph node and allograft-resident lymphocyte populations quantified.

### Example 2: CD39 and/or CD73 as Effector Domains Creating a Purinergic Halo Surrounding a Cell Type or Tissue of Interest

[0568] A catalytically active fragment of CD39 and/or CD73 is fused to a targeting domain. Upon binding and accumulation at the target site, CD39 phosphohydrolyzes ATP to AMP. Upon binding and accumulation at the target site, CD73 dephosphorylates extracellular AMP to adenosine. A soluble catalytically active form of CD39 suitable for use herein has been found to circulate in human and murine blood, see, e.g., Yegutkin et al FASEB J. 2012 September; 26(9):3875-83. A soluble recombinant CD39 fragment is also described in Inhibition of platelet function by recombinant soluble ecto-ADPase/CD39, Gayle et al J Clin Invest. 1998 May 1; 101(9): 1851-1859. A suitable CD73 molecule comprises a soluble form of CD73 which can be shed from the membrane of endothelial cells by proteolytic cleavage or hydrolysis of the GPI anchor by shear stress see, e.g., reference: Yegutkin G, Bodin P, Burnstock G. Effect of shear stress on the release of soluble ecto-enzymes ATPase and 5′-nucleotidase along with endogenous ATP from vascular endothelial cells. Br J Pharmacol 2000; 129: 921-6.

[0569] The local catalysis of ATP to AMP or AMP to adenosine will deplete local energy stores required for fulminant T effector cell function. Treg function should not be impacted by ATP depletion due to their reliance on oxidative phosphorylation for energy needs (which requires less ATP), wherein T memory and other effector cells should be impacted due their reliance on glycolysis (requiring high ATP usage) for fulminant function.

### Example 3: Measuring Antibody-Induced PD-1 Signaling

[0570] Jurkat cells that stably express 2 constructs, 1) a human PD-1 polypeptide fused to a beta-galactosidase, which can be referred to as an “Enzyme donor” and 2) a SHP-2 polypeptide fused to a beta-galactosidase, which can be referred to as an “Enzyme acceptor.” A PD-1 antibody is contacted with the cell and when the PD-1 is engaged, SHP-2 is recruited to PD-1. The enzyme acceptor and enzyme donor form a fully active beta-galactosidase enzyme that can be assayed. This assay can be used to show activation of PD-1 signaling.

### Example 4: Measuring PD-1 Agonism

[0571] PD-1 agonists inhibit T cell activation. Without being bound to any particular theory, PD-1 agonism inhibits anti-CD3-induced T cell activation. Human or mouse cells are preactivated with PHA (for human T cells) or ConA (for mouse T cells) so that they express PD-1. The T cells are then “reactivated” with anti-CD3 in the presence of anti-PD-1 (or PD-L1) for the PD-1 agonism assay. T cells that receive a PD-1 agonist signal in the presence of anti-CD3 will show decreased activation, relative to anti-CD3 stimulation alone. Activation can be readout by proliferation or cytokine production (IL-2, IFNg, IL-17) and possibly by other markers, such as CD69 activation marker.

### Example 5. Expression and Function of Anti-MAdCAM/mouse PD-L1 Fusion Protein is not Impacted by Molecular Configuration

[0572] A bispecific fusion molecule comprising an anti-mouse MAdCAM Ab/mouse PD-L1 molecule was expressed in two orientations. The first orientation consisted of an anti-mouse MAdCAM IgG with mouse PD-L1 fused at the C-terminus of it's heavy chain. The second orientation consisted of mouse PD-L1 fused at the N-terminus of an Ig Fc domain, with a C-terminally fused anti-mouse MAdCAM scFv. Both molecules were found to be well expressed in a mammalioan expression system. It was also found that the molecules can bind to their respective binding partners, MAdCAM or PD-1 in both orientations, simultaneously. These results demonstrate that a molecule consisting of an anti-MAdCAM antibody fused to PD-L1, can be expressed in configurations whereby PD-L1 is N- or C-terminally fused to the Fc and retain proper functional binding activity.

[0573] Briefly, a pTT5 vector containing the single gene encoding a single polypeptide with mouse PD-L1 fused N-terminally of human IgG1 Fc domain and with C-terminal fused anti-MAdCAM scFv MECA89 was transfected into HEK293 Expi cells. Alternatively, two plasmids were co-transfected at equimolar ratios. The first plasmid encoded the light chain of MECA89 and the second encoded the full length IgG1 heavy chain of MECA89 with C-terminally fused mouse PD-L1. After 5-7 days, cell culture supernatants expressing the molecules were harvested, and clarified by centrifugation and filtration through a 0.22 μm filtration device. The bispecific molecules were captured on proA resin. The resin was washed with PBS pH 7.4 and the captured molecule was eluted using 100 mM glycine pH 2.5, with neutralization using a tenth volume of 1M Tris pH 8.5. The protein was buffer exchanged into PBS pH 7.4, and analyzed by size exclusion chromatography on a Superdex 200 3.2/300. Analysis of 1 μg of purified material by reducing and non-reducing SDS-PAGE on a Bis-Tris 4-12% gel was conducted.

[0574] Both proteins, regardless of orientation were expressed at over 10 mg/L, and were over 95% monodispersed after purification as shown by size exclusion chromatography and reducing/non-reducing SDS-PAGE. Accordingly, this demonstrates the production and activity of dual function bispecific molecules with different immunomodulators and tissue targeting moieties at the N- and C-terminus of an Fc domain. This also shows specifically that a PD-1 agonist and binding partner can be expressed at the N- or C-terminus of an Ig Fc domain.

### Example 6. A Bispecific Molecule Comprising a PD-1 Agonist Protoytpe Tethered to MAdCAM can Bind MAdCAM and PD-1 Simultaneously

[0575] Briefly, an immunosorbent plate was coated with mouse PD-1 at a concentration of 1 μg/mL in PBS pH 7.4, 75 μL/well, and incubated overnight at 4° C. Wells were washed with PBS pH 7.4 containing 0.05% Tween-20 (wash buffer) three times, and then blocked with 200 μl/well 1% BSA in PBS pH 7.4 (block buffer) for two hours at room temperature. After three washes with wash buffer, two bispecific molecules that comprises the PD-1 agonist prototype at either the N-terminus or C-terminus were diluted to 1 nM, 10 nM, and 100 nM in PBS containing 1% BSA and 0.05% Tween-20 (assay buffer). The diluted material was added to the mouse PD-1 coated plate at 75 μL/well for 1 hour at room temperature. After three washes with wash buffer, mouse MAdCAM was added to the plate at 75 μL/well, at a concentration of 10 nM in assay buffer for 1 hr at room temperature. After three washes with wash buffer, a goat biotinylated anti-mouse MAdCAM polyclonal antibody, diluted to 0.5 μg/mL in assay buffer, was added to the plate at 75 μL/well for 1 hour at room temperature. After three washes with wash buffer high sensitivity streptavidin HRP diluted in assay buffer at 1:5000 was added to the plate at 75 μl/well for 15 minutes at room temperature. After three washes with wash buffer and 1 wash with wash buffer (with no Tween-20), the assay was developed with TMB, and stopped with 1N HCL. OD 450 nm was measured. The experiment included appropriate controls for non-specific binding to the plate/block in the absence of mouse PD-1, as well as no MAdCAM controls, and mono-specific controls, that are unable to form a bridge between mouse PD-1 and mouse MAdCAM.

[0576] The results demonstrated that at concentrations of 1 nM, 10 nM, and 100 nM, both bispecific molecules, are able to simultaneously interact with mouse MAdCAM and mouse PD-L1, whilst the monospecific controls did not create a bridging signal. Additionally, there was no binding of any compound to MAdCAM at any concentration tested, when mouse PD-1 was not present on the plate surface, indicating none of the test compounds were interacting non-specifically with the plate surface. Thus, these results demonstrate that a bispecific molecule that is targeting binding to both MAdCAM and PD-1 can successfully bind to both molecules. Although the experiments were performed with PD-L1 as a substitute for a PD-1 antibody, it is expected that the PD-1 antibody will function in a similar manner.

### Example 7. A Bispecific PD-L1 Prototype Molecule Inhibits T Cells in a PD-1 Agonist Assay

[0577] A bispecific molecule that mimics a PD-1 agonist antibody was tested to demonstrate that PD-1 agonsim can inhibit T cells. Briefly, 7 week old female C57LB/6 mice were sacrificed and their splenocytes were isolated. The splenocytes were exposed to ConA for 3 days and then exposed to anti-CD3 in the presense or absence of the PD-1 type molecule, which in this example was a PD-L1 bispecific molecule that was tethered to a plate using anti-human IgG. T cells were then introduced to the PD-L1 bispecific molecule. The PD-L1, which mimics a PD-1 antibody were found to be a T cell agonist and inhibit T cell activation. The same experiments were repeated using a PD-L1 bispecific molecule that was fused with an anti-MAdCAM antibody, which were tethered to a plate by interacting with a MAdCAM coated plate. The PD-1 agonist mimic, the PD-L1/anti-MAdCAM antibody were found to be effective agonists of T cell activity. These results demonstrate that a bispecific molecule that mimics a PD-1 antibody/MAdCAM antibody fusion protein can exert functional inhibitory signaling into primary mouse T cell blasts when the molecule is captured via the MAdCAM antibody component at the end of the molecule.

### Example 8: A Bispecific PD-1 Prototype Molecule with a Different Tissue Tether can Inhibit T Cells in a PD-1 Agonist Assay

[0578] A fusion molecule of a PD-L1 was used as a substitute for a PD-1 antibody and linked to a Class I H-2Kk antibody. The MHC Class I H-2K^{k} tethered PD-L1 molecule had functional binding, similar to the data described in Examples 6 and 7. Briefly, splenocytes from C57Bl/6 mice were stimulated with Concanavalin A (ConA) and IL-2 for 3 days. Plates were coated with anti-CD3 (2C11) overnight at 4 C, washed. Plates were coated with anti-human IgG for 3 hrs at 37 C and washed. Mono-specific anti-H-2K^{k} (16-3-22) or bispecific anti-H-2K^{k}:mPD-L1 were added and incubated for 3 hr at 37 C and washed. All test articles contained a human IgG1-Fc portion. PBS (No Tx) was added to determine the assay background. ConA blasts were washed 2 times, added to the plate and incubated at 37 C. Supernatants were removed after 24 hrs. IFNg levels were determined by MSD. After 48 hrs, cell viability/metabolism was analyzed by Cell Titer-glo. When captured via the IgG Fc domain, an MHC Class I tethered PD-L1 bispecific can attenuate T cell activation in a mouse PD-1 agonism assay. Therefore, this example demonstrates that a different bispecific prototype molecule can exert functional inhibitory signaling into primary mouse T cell blasts—when the molecule is captured via a different tissue tether—in this case a mouse antibody to MHC Class I H-2K^{k}. Accordingly, this data demonstrates that the tethering is not specific to MAdCAM and is possible with other molecules that can act as targeting moieties as provided herein.

### Example 9. PD-1 Agonists can Induce Signaling in Jurkat Cells

[0579] Jurkat cells expressing both human PD-1 fused to a beta-galactosidase enzyme donor and SHP-2 fused to a beta-galactosidase enzyme acceptor are added to test conditions in a plate and incubated for 2 hrs. Agonist PD-1 antibodies induce signaling and SHP-2 recruitment, enzyme complementation and formation of an active beta-galactosidase enzyme. Beta-galactosidase substrate was added and chemiluminescence can be measured on a standard luminescence plate reader. Agonism is measured by chemiluminescence, where the more chemiluminescence that is measured indicates the greater agonism.

[0580] Agonism of a PD-1/MAdCAM bispecific molecule was measured in this assay. C110 (UCB) and CC-90006 (Celgene/Anaptys) were used as PD-1 agonist antibodies. Both are active and exhibit PD-1 agonism in functional assay in Ig-capture assay format. Briefly, plates were coated with anti-human IgG for overnight at 4 C and washed. Anti-tetanus toxin (TT) or benchmark agonist anti-PD-1 monoclonal antibodies, C110 or CC-90006 were added and incubated for 1 hr at 37 C and washed. All test articles contained a human IgG1-Fc. Media (No Tx) was added to determine the assay background. Plates were washed 3 times. Jurkat cells expressing both human PD-1 fused to a beta-galactosidase enzyme donor and SHP-2 fused to a beta-galactosidase enzyme acceptor were added and incubated for 2 hrs. Agonist PD-1 antibodies induce signaling and SHP-2 recruitment, enzyme complementation and formation of an active beta-galactosidase enzyme. Beta-galactosidase substrate was added and chemiluminescence was measured on a standard luminescence plate reader. The two human PD-1 agonist antibodies (C110 and CC-90006) bind and induce signaling (a surrogate for agonism) in the modified Jurkat reporter assay. Thus, this assay is a functional PD-1 agonism assay. C110:MECA89 (MECA89 is a known MAdCAM antibody) is a novel bispecific molecule created by fusing MAdCAM antibody, MECA89[scFv], to C-terminus of the heavy chain of C110. This fusion protein was found to be active and exhibit PD-1 agonism in functional assay when captured via IgG Fc domain, as was C110 only protein. However, only Cl10:MECA89 is active in functional assay format using MAdCAM protein as capture (the monospecific components do not signal).

[0581] Briefly, plates were coated with either anti-human IgG or recombinant mMAdCAM-1 overnight at 4 C and washed. Mono-specific Anti-tetanus toxin (TT), anti-MAdCAM-1 (MECA89) or agonist anti-PD-1 (C110) or bispecific C110:MECA89 were added and incubated for 1 hr at 37 C and washed. All test articles contained a human IgG1-Fc portion. PBS (No Tx) was added to determine the assay background. Plates were washed 2 times. Jurkat cells expressing both human PD-1 fused to a beta-galactosidase enzyme donor and SHP-2 fused to a beta-galactosidase enzyme acceptor were added and incubated for 2 hrs. Agonist PD-1 antibodies induce signaling and SHP-2 recruitment, enzyme complementation and formation of an active beta-galactosidase enzyme. Beta-galactosidase substrate was added and chemiluminescence was measured on a standard luminescence plate reader. Results: Both C110, and the MAdCAM-tethered C110 bispecific molecules can induce PD-1 signaling in the Jurkat reporter assay when the plate is coated with an anti-IgG Fc capture, but only the MAdCAM-tethered bispecific can induce PD-1 signaling in the reporter assay when the plate is coated with recombinant MAdCAM protein. These results demonstrate that the molecule tethered with MAdCAM and contains a PD-1 agonist antibody are functional, which is similar to the results shown with the PD-L1 as the PD-1 agonist surrogate.

### Example 10: Generation of PD-1 Agonist Antibodies

[0582] PD-1 deficient mice immunized with mouse PD-1 under conditions to generate an immune response against PD-1. 54 hybridomas were generated and identified that bind mouse PD-1. The antibodies produced by the different hybridomas were analyzed for T cell agonism according to the methods described in Examples 4 and 6. Out of the 54 hybridomas at least 6 were identified as PD-1 agonists. The antibodies were also tested for binding on PD-1 and were found to bind at the same site as the PD-L1 binding site.

[0583] Briefly, binding to the PD-L1 binding site was determined using the following assay. Immunosorbent plates were coated overnight with 75 μL of recombinant mouse PD-L1-Fc (2 μg/mL) in 1×PBS, pH 7.4. Plates were then washed 3× with 1×PBS and blocked for 2 hours at room temperature with 1×PBS supplemented with 1% BSA. Recombinant mouse PD-1-Fc (1 nM) was incubated with 100 nM of the indicated anti-mouse PD-1 antibody in 1×PBS supplemented with 1% BSA and 0.05% Tween-20 (Assay Buffer) for 1 hour at room temperature, shaking. After blocking, plates were washed 3× with 1×PBS supplemented with 0.05% Tween-20 PBST and the antibody-PD-1 conjugates were incubated with plate-bound mouse PD-L1. After washing away unbound PD-1 with PBST, plates were incubated with 75 of biotinylated, polyclonal anti-PD-1 antibody (0.5 μg/mL) in assay buffer, followed by amplification with 1:5000 streptavidin HRP also diluted in assay buffer. Plates were washed three times with PBST followed by three washes with 1×PBS before addition of 100 μL TMB followed by 100 μL 1M HCl to stop the developing. Absorbance read at 450 nm and normalized to binding of PD-1 to PD-L1 in the absence of antibody. The results showed that the active antibodies bind to the PD-L1 binding site. The inactive antibodies did not bind to the PD-L1 binding site. Therefore, this example demonstrates the ability to produce anti-PD-1 antibodies that are agonists, in addition to the previously identified PD-1 agonist antibodies described herein.

### Example 11: Tethered Anti-PD-1 Antibodies Acts as PD-1 Agonists

[0584] A human antibody scFv phage library was panned against recombinant human, mouse, and cyno PD-1 proteins across iterative selection rounds to enrich for antibody clones that recognize all three aforementioned species orthologues of PD-1. The scFv clones were configured in nt-VH-Linker-VL-ct format and fused to the M13 phage surface via the pIII coat protein. After selections, clonal scFvs were screened for binding to human, mouse, and cyno PD-1 expressed on the cell surface of CHO cells. Clones that were found to be cross reactive to all three cell surface expressed PD-1 species orthologues were converted using standard molecular biology techniques, into a human IgG1 format whereby each molecule was comprised of four polypeptide chains in total (2 heavy, and 2 light chains). The two light chains were identical to each other and the two heavy chains were identical to each other as provided.

[0585] The two identical heavy chains homodimerize and the two identical light chains pair with each heavy chain to form an intact human IgG1. The Fc domain contains the L234A, L235A, and G237A mutations to ablate FcγR interactions. The converted human IgG1 anti-PD-1 antibodies were transfected and expressed in HEK293 Expi cells, and purified by protein A chromatography. The protein concentration was determined using a nanodrop spectrophotometer in conjunction with antibody specific extinction coefficients. Antibodies were formulated in PBS pH 7.4.

[0586] The anti-PD-1 antibodies were next tested in the Jurkat assay described herein for agonist activity. Briefly, tissue culture plates were coated with anti-IgG or left uncoated. For captured format, test articles or controls were added to the anti-IgG coated wells at 100 nM, 25 nM or 12.5 nM and incubated for 3 hrs at 37 C. Plates were washed and Jurkat PD-1 cells were added. For the soluble format, soluble test articles or controls were added to wells at 100 nM, 25 nM or 12.5 nM already containing Jurkat PD1 cells. Luminescence was measured in a plate reader. The results demonstrated that nine of the twelve human/mouse cross-reactive PD-1 antibodies showed dose-dependent activity in the Jurkat assay when the anti-PD-1 antibodies were captured via anti-IgG, but not in the soluble format. This data demonstrates that the anti-PD-1 antibody can act as an agonist when tethered to its target by a targeting moiety.

[0587] In conclusion, without being bound to any particular theory, the data presented herein demonstrate that a PD-1 agonist/MAdCAM bispecific molecule can bind to both MAdCAM and PD-1 and inhibit effector T cell activity through PD-1 agonism. Thus, the molecules can be used to treat the various conditions provided herein and provide for localized and/or tissue specific immunomodulation and the down regulation of a T-Cell response.

### Example 12: Generation of IL-2 Muteins

[0588] A pTT5 vector containing the single gene encoding the human IL-2 mutein polypeptide fused N-terminally (SEQ ID NO: 57) or C-terminally (SEQ ID NO: 58) to human IgG1 Fc domain was transfected into HEK293 Expi cells. After 5-7 days, cell culture supernatants expressing IL-2 muteins were harvested, and clarified by centrifugation and filtration through a 0.22 μm filtration device. IL-2 muteins were captured on proA resin. The resin was washed with PBS pH 7.4 and the captured protein was eluted using 0.25% acetic acid pH 3.5, with neutralization using a tenth volume of 1M Tris pH 8.0. The protein was buffer exchanged into 30 mM HEPES 150 mM NaCl pH 7, and analyzed by size exclusion chromatography on a Superdex 200 3.2/300 column. Analysis of 5 ug of purified material by reducing and non-reducing SDS-PAGE on a Bis-Tris 4-12% gel was conducted. The IL-2 muteins were expressed at over 10 mg/L, and were over 95% monodispersed after purification as shown by size exclusion chromatography and reducing/non-reducing SDS-PAGE.

### Example 13: IL-2 Mutein Molecules Can Bind CD25

[0589] An immunosorbent plate was coated with CD25 at a concentration of 0.5 μg/mL in PBS pH 7.4, 75 μl/well, and incubated overnight at 4° C. Wells were washed with PBS pH 7.4 containing 0.05% Tween-20 (wash buffer) three times, and then blocked with 200 μl/well 1% BSA in PBS pH 7.4 (block buffer) for two hours at room temperature. After three washes with wash buffer IL-2 mutein molecules of Example 12 were diluted to eleven—two fold serial dilution in PBS containing 1% BSA and 0.05% Tween-20 (assay buffer) with 2 nM being the highest concentration. The diluted material was added to the CD25 coated plate at 75 μL/well for 1 hour at room temperature. After three washes with wash buffer, a goat biotinylated anti-IL-2 polyclonal antibody, diluted to 0.05 μg/mL in assay buffer, was added to the plate at 75 μL/well for 1 hour at room temperature. After three washes with wash buffer high sensitivity streptavidin HRP diluted in assay buffer at 1:5000 was added to the plate at 75 μL/well for 15 minutes at room temperature. After three washes with wash buffer and 1 wash with wash buffer (with no Tween-20), the assay was developed with TMB, and stopped with 1N HCL. OD 450 nm was measured. The experiment included appropriate controls for non-specific binding of IL-2. mutein molecules to the plate/block in the absence of CD25 and a negative control molecule that is unable to bind CD25.

[0590] The results indicate that at concentrations of 2 nM-1.9 μM, IL-2 mutein molecules are able to bind CD25 with sub nanomolar EC50s. Additionally, there was no detection of any compound at any concentration tested, when CD25 was not present on the plate surface, indicating none of the test compounds were interacting non-specifically with the plate surface (data not shown).

### Example 14: In Vitro p-STAT5 Assay to Determine Potency and Selectivity of IL-2 Mutein Molecules

[0591] Peripheral blood mononuclear cells (PBMCs) were prepared using FICOLL-PAQUE Premium and Sepmate tubes from freshly isolated heparinized human whole blood. PBMCs were cultured in 10% fetal bovine serum RPMI medium in the presence of wild-type IL-2 or IL-2 mutein of Example 12 for 20 minutes and then fixed for 10 minutes with BD Cytofix. Fixed cells were sequentially permeabilized with BD Perm III and then BioLegend FOXP3 permeabilization buffer. After blocking with human serum for 10 minutes, cells were stained for 30 minutes with antibodies for phospho-STAT5 FITC, CD25 PE, FOXP3 AF647 and CD4 PerCP Cy5.5 and then acquired on an Attune NXT with plate reader. The IL-2 mutein of Example 12 potently and selectively induces STAT5 phosphorylation in Tregs but not Teffs.

### Example 15: Methods for Generation of Bispecific MAdCAM-Tethered IL-2 Mutein Molecules

[0592] A pTT5 vector containing the single gene encoding the single B0001 polypeptide comprising an IL-2 mutein with a N88D, V69A, and Q74P mutations fused to a Fc protein with the LALA mutations as provided for herein with a GGGGSGGGGSGGGGS (SEQ ID NO: 30) linker and scFV antibody that binds to MAdCAM or a similar molecule but with a GGGGSGGGGSGGGGSGGGGS (SEQ ID NO: 22) linker B0002 with human IL-2 mutein fused N-terminally of human IgG1 Fc domain and with c-terminal fused anti-mMAdCAM scFv MECA89 was transfected into HEK293 Expi cells. For B0003, two plasmids were co-transfected at equimolar ratios. The first plasmid encoded the light chain of MECA89 and the second encoded the full length IgG1 heavy chain of MECA89 with C-terminally fused human IL-2 mutein. After 5-7 days, cell culture supernatants expressing B0001, B0002, and B0003 were harvested, and clarified by centrifugation and filtration through a 0.22 μm filtration device. B0001, B0002, and B0003 were captured on proA resin. The resin was washed with PBS pH 7.4 and the captured protein was eluted using 0.25% acetic acid pH 3.5, with neutralization using a tenth volume of 1M Tris pH 8.0. The protein was buffer exchanged into 30 mM HEPES 150 mM NaCl pH 7, and analyzed by size exclusion chromatography on a Superdex 200 3.2/300. Analysis of 1 ug of purified material by reducing and non-reducing SDS-PAGE on a Bis-Tris 4-12% gel was conducted.

[0593] B0001, B0002, and B0003 were expressed at over 8 mg/L, and were over 95% monodispersed after purification as shown by size exclusion chromatography and reducing/non-reducing SDS-PAGE. This experiment shows that dual function bispecific molecules with immunomodulators at either the N- or C-terminus can be produced and the position of the IL-2. mutein protein (either at the N- or C-terminus) did not significantly alter expression and therefore, either format can be used.

### Example 16: Bispecific MAdCAM-Tethered IL-2 Mutein Molecules can Bind MAdCAM and CD25 Simultaneously

[0594] An immunosorbent plate was coated with recombinant mouse MAdCAM-1 at a concentration of 1 μg/mL in PBS pH 7.4, 75 μL/well, and incubated overnight at 4° C. Wells were washed with PBS pH 7.4 containing 0.05% Tween-20 (wash buffer) three times, and then blocked with 200 μL/well 1% BSA in PBS pH 7.4 (block buffer) for two hours at room temperature. After three washes with wash buffer, B0001, B0002, B0003 were diluted to 1 nM, 10 nM, and 100 nM in PBS containing 1% BSA and 0.05% Tween-20 (assay buffer). The diluted material was added to the mouse MAdCAM-1 coated plate at 75 μL/well for 1 hour at room temperature. After three washes with wash buffer, human CD25 was added to the plate at 75 μL/well, at a concentration of 10 nM in assay buffer for 1 hour at room temperature. After three washes with wash buffer, a goat biotinylated anti-human CD25 polyclonal antibody, diluted to 0.4 μg/mL in assay buffer, was added to the plate at 75 μL/well for 1 hour at room temperature. After three washes with wash buffer high sensitivity streptavidin HRP diluted in assay buffer at 1:5000 was added to the plate at 75 μL/well for 15 minutes at room temperature. After three washes with wash buffer and 1 wash with wash buffer (with no Tween-20), the assay was developed with TMB, and stopped with 1N HCL. OD 450 nm was measured. The experiment included appropriate controls for non-specific binding of the proteins of Example 15 to the plate/block in the absence of mouse MAdCAM-1, as well as no CD25 controls, and mono-specific controls, that are unable to form a bridge between human CD25 and mouse MAdCAM.

[0595] It was found that that at concentrations of 1 nM, 10 nM, and 100 nM, the bispecific molecules of Example 15 were able to simultaneously interact with mouse MAdCAM and human CD25, whilst the monospecific controls, did not create a bridging signal. Additionally, there was no binding of any compound to CD25 at any concentration tested, when mouse MAdCAM-1 was not present on the plate surface, indicating none of the test compounds were interacting non-specifically with the plate surface. These results demonstrate that the bispecific molecules can bind both MAdCAM and CD25 simultaneously in a functional binding assay, such as an ELISA.

### Example 17: In Vitro p-STAT5 Assay Demonstrating Activity and Selectivity of Bispecific MAdCAM-Tethered IL-2 Mutein when in Solution or when Tethered

[0596] Recombinant mouse MAdCAM was coated onto wells of a 96 well high binding plate (Corning) overnight. After washing 2 times with PBS, the plate was blocked for 1 hour with 10% FBS RPMI media. A MAdCAM-tethered IL-2 mutein bispecific of Example 15 or untethered IL-2 mutein control (such as those prepared in Example 12) were captured for 1 hour. After washing 2 times with PBS, freshly-isolated human PBMCs were stimulated for 60 minutes with captured IL-2 mutein or for comparison IL-2 mutein in solution. Cells were then fixed for 10 minutes with BD Cytofix, permeabilized sequentially with BD Perm III and BioLegend FOXP3 permeabilization buffer, blocked with human serum and stained for 30 minutes with antibodies against phospho-STAT5 FITC (CST), CD25 PE, FOXP3 AF647 and CD4 PerCP Cy5.5 (BD) and acquired on an Attune NXT with plate loader. In solution, both molecules have comparable activity and selectivity on T_{reg} versus T_{eff}. Plates coated with mouse MAdCAM were able to capture the bispecific molecule of Example 15 and the captured/immobilized bispecific molecule was still able to selectively activate T_{regs} over T_{effs}. This example demonstrates that MAdCAM-tethered IL-2 mutein molecules can retain biological activity and selectivity when in solution or when captured/immobilized.

### Example 18: Immunogenicity of IL-2 Muteins

[0597] IL-2 mutein sequences were analyzed using the NetMHCIIPan 3.2 software, which can be found at www “dot” cbs “dot” dtu “dot” dk/services/NetMHCIIpan/. Artificial neural networks were used to determine peptide affinity to MHC class II alleles. In that analysis, 9-residue peptides with potentially direct interaction with the MHC class II molecules were recognized as binding cores. Residues adjacent to binding cores, with potential to influence the binding indirectly, were also examined as masking residues. Peptides comprising both the binding cores and masking residues were marked as strong binders when their predicted K_{D} to the MHC class II molecule was lower than 50 nM. Strong binders have a greater chance of introducing T cell immunogenicity.

[0598] A total of 9 MHCII alleles that are highly represented in North America and Europe were included in the in silico analysis. The panel of IL-2 mutein molecules tested included the IL-2 muteins with L53I, L56I, L80I, or L118I mutations. Only MHCII alleles DRB1_1101, DRB1_1501, DRB1_0701, and DRB1_0101 yielded hits with any of the molecules assessed. The peptide hits for DRB_1501 were identical between all constructs tested including wild-type IL-2 with the C125S mutation. The addition of L801 removes 1 T cell epitope for DRB1-0101 [ALNLAPSKNFHLRPR (SEQ ID NO: 626)] and modestly reduces the affinity of two other T cell epitopes [EEALNLAPSKNFHLR (SEQ ID NO: 627) and EALNLAPSKNFHLRP (SEQ ID NO: 628)]. For MHCII allele DRB1-0701, L80I removes 1 T cell epitope [EEALNLAPSKNFHLR (SEQ ID NO: 627)]. Therefore, the data demonstrates that a IL-2 mutein comprising the L80I mutation should be less immunogenic, which is a surprising and unexpected result from the in silico analysis.

### Example 19: Generation of Additional IL-2 Muteins

[0599] A pTT5 vector containing the single gene encoding the single IL-2 mutein of SEQ ID NO: 53, SEQ ID NO: 54, SEQ ID NO: 55, SEQ ID NO: 56 (and IL-2 mutein control; SEQ ID NO: 50) polypeptide with human IL-2 mutein fused N-terminally of human IgG1 Fc domain was transfected into HEK293 Expi cells. After 5-7 days, cell culture supernatants expressing SEQ ID NO: 53, SEQ ID NO: 54, SEQ ID NO: 55, SEQ ID NO: 56 (and IL-2 mutein control; SEQ ID NO: 50) were harvested, and clarified by centrifugation and filtration through a 0.22 μm filtration device. SEQ ID NO: 53, SEQ ID NO: 54, SEQ ID NO: 55, SEQ ID NO: 56 (and IL-2 mutein control; SEQ ID NO: 50) were captured on proA resin. The resin was washed with PBS pH 7.4 and the captured protein was eluted using 0.25% acetic acid pH 3.5, with neutralization using a tenth volume of 1M Tris pH 8.0. The protein was buffer exchanged into 30 mM HEPES 150 mM NaCl pH 7, and analyzed by size exclusion chromatography on a Superdex 200 3.2/300 column. Analysis of 5 μg of purified material by reducing and non-reducing SDS-PAGE on a Bis-Tris 4-12% gel was conducted.

[0600] IL-2 muteins SEQ ID NO: 53, SEQ ID NO: 54, SEQ ID NO: 55, SEQ ID NO: 56 (and IL-2 mutein control; SEQ ID NO: 50) expressed at over 45 mg/L, and were over 95% monodispersed after purification as shown by size exclusion chromatography and reducing/non-reducing SDS-PAGE.

### Example 20: IL-2 Muteins of Example 19 can Bind CD25

[0601] An immunosorbent plate was coated with CD25 at a concentration of 0.5 μg/mL in PBS pH 7.4, 75 μL/well, and incubated overnight at 4° C. Wells were washed with PBS pH 7.4 containing 0.05% Tween-20 (wash buffer) three times, and then blocked with 200 μL/well 1% BSA in PBS pH 7.4 (block buffer) for two hours at room temperature. After three washes with wash buffer IL-2 muteins SEQ ID NO: 53, SEQ ID NO: 54, SEQ ID NO: 55, SEQ ID NO: 56 were diluted to eleven—two fold serial dilution in PBS containing 1% BSA and 0.05% Tween-20 (assay buffer) with 2 nM being the highest concentration. The diluted material was added to the CD25 coated plate at 75 μL/well for 1 hour at room temperature. After three washes with wash buffer, a goat biotinylated anti-IL-2 polyclonal antibody, diluted to 0.05 μg/mL in assay buffer, was added to the plate at 75 μL/well for 1 hour at room temperature. After three washes with wash buffer high sensitivity streptavidin HRP diluted in assay buffer at 1:5000 was added to the plate at 75 μL/well for 15 minutes at room temperature. After three washes with wash buffer and 1 wash with wash buffer (with no Tween-20), the assay was developed with TMB, and stopped with 1N HCL. OD 450 nm was measured. The experiment included appropriate controls for non-specific binding of the molecules to the plate/block in the absence of CD25. The results indicate that at concentrations of 2 nM-1.9 μM, the muteins of Example 19 were able to bind CD25 with sub nanomolar EC50s. Additionally, there was no detection of any compound at any concentration tested, when CD25 was not present on the plate surface, indicating none of the test compounds were interacting non-specifically with the plate surface. Thus, the muteins of Example 19 can bind to CD25.

### Example 21: IL-2 Muteins of Example 19 are Potent and Selective

[0602] Peripheral blood mononuclear cells (PBMCs) were prepared using FICOLL-PAQUE Premium and Sepmate tubes from freshly isolated heparinized human whole blood. PBMCs were cultured in 10% fetal bovine serum RPMI medium in the presence of wild-type IL-2 or the muteins of Example 19 for 20 minutes and then fixed for 10 minutes with BD Cytofix. Fixed cells were sequentially permeabilized with BD Perm III and then BioLegend FOXP3 permeabilization buffer. After blocking with human serum for 10 minutes, cells were stained for 30 minutes with antibodies for phospho-STAT5 FITC (CST), CD25 PE, FOXP3 AF647 and CD4 PerCP Cy5.5 (all BD) and then acquired on an Attune NXT with plate reader. The IL-2 muteins of Example 19 were found to be potent and have selectivity against Treg versus Teff. The mutein comprising the L118I mutation was found to have increased activity and selectivity as compared to the other muteins.

### Example 22: IL-2 Muteins Expand Tregs in Humanized Mice

[0603] NSG mice humanized with human CD34+ hematopoietic stem cells were purchased from Jackson Labs. On days 0 and 7, the mice were dosed subcutaneously with 1 μg IL-2 mutein (SEQ ID NO: 50) or other IL-2 muteins SEQ ID NO: 53, SEQ ID NO: 54, SEQ ID NO: 55, or SEQ ID NO: 56. On Day 7, mice were euthanized and whole blood and spleens were collected. Whole blood was aliquoted into a 96 well deep well plate and fixed for 10 minutes using BD Fix Lyse. Splenocytes were isolated using 70 μm filters (BD) and red blood cells were lysed using RBC lysis buffer from BioLegend. After washing with 2% fetal bovine serum PBS, splenocytes were labeled with near infrared live dead stain (Invitrogen) for 20 minutes and then fixed for 20 minutes using BioLegend fixation buffer. Both whole blood cells and splenocytes were then permeabilized using BioLegend FOXP3 permeabilization buffer, blocked with human serum and stained for 30 minutes with antibodies against human CD8a FITC (BL), human CD25 PE (BD), human FOXP3 AF647 (BD) CD4 PerCP Cy5.5 (BD), human Siglec-8 PE Cy7 (BL), human CD3 BV421 (BL), human CD45 BV605 (BL), human CD56 BV785 (BL) and mouse CD45 (BV711) and acquired on an Attune NXT with plate loader.

[0604] Compared to vehicle control, IL-2 muteins SEQ ID NO: 54 and SEQ ID NO: 56 selectively induced Tregs in mouse spleens and whole blood (p<0.0005 by ANOVA with Dunn's Multiple Comparison Test). The other IL-2 muteins also increased the frequency of Tregs, though these changes compared to the vehicle group were not statistically significant. There were no significant changes in the frequencies of CD56+NK cells, CD3+ T cells, CD8+ cytotoxic T lymphocytes, CD4+ helper T cells or CD25lo/FOXP3− T effectors in mice dosed with SEQ ID NO: 54 and SEQ ID NO: 56. These results demonstrate that the IL-2 muteins increase the frequency of regulatory T cells.

### Example 23: Generation of Bispecific mMAdCAM-Tethered IL-2 Mutein Molecule

[0605] A bispecific MAdCAM-IL-2 mutein was produced, with the antibody being the heavy and light chains of MECA89. This was produced using two plasmids encoding both heavy and light chains were co-transfected at equimolar ratios. The first plasmid encoded the light chain of MECA89 and the second encoded the full length IgG1 heavy chain of MECA89 with C-terminally fused to a human IL-2. mutein comprising the L118I mutation. After 3-5 days, cell culture supernatants expressing the bispecific were harvested, and clarified by centrifugation and filtration through a 0.22 μm filtration device. The bispecific was captured on proA resin. The resin was washed with PBS pH 7.4 and the captured protein was eluted using 0.25% acetic acid pH 3.5, with neutralization using a tenth volume of 1M Tris pH 8.0. The protein was buffer exchanged into 30 mM HEPES 150 mM NaCl pH 7, and analyzed by size exclusion chromatography on an AdvanceBio SEC column. Analysis of 1 μg of purified material by reducing and non-reducing SDS-PAGE on a Bis-Tris 4-12% gel was conducted.

[0606] The bispecific molecule expressed at 17 mg/L, and was over 95% monodispersed after purification as shown by size exclusion chromatography and reducing/non-reducing SDS-PAGE. These results demonstrate that it was able to produce dual function bispecific molecules with immunomodulators at the C-terminus.

### Example 24: Generation of MAdCAM Antibodies

[0607] A human antibody scFv phage library was panned against recombinant human, mouse, and cyno MAdCAM proteins across iterative selection rounds to enrich for antibody clones that recognize all three aforementioned species orthologues of MAdCAM. The scFv clones were configured in nt-VH-Linker-VL-ct format and fused to the M13 phage surface via the pIII coat protein. After selections, clonal scFvs were screened by ELISA for binding to human, mouse, and cyno MAdCAM expressed on the cell surface of CHO cells. Clones that were found to be cross reactive to all three cell surface expressed MAdCAM species orthologues were converted using standard molecular biology techniques or gene synthesis, into a human IgG1 format whereby each molecule was comprised of four polypeptide chains in total (2 heavy, and 2 light chains). The two light chains were identical to each other and the two heavy chains were identical to each other. The two identical heavy chains (1 and 2) homodimerize and the two identical light chains (3 and 4) pair with each heavy chain to form an intact human IgG1. The Fc domain contains the L234A, L235A, and G237A mutations to ablate FcγR interactions. The format can be illustrated as follows:
[0608] Chain 1: nt-VH1-CH1-CH2-CH3-ct
[0609] Chain 2: nt-VH1-CH1-CH2-CH3-ct
[0610] Chain 3: nt-VK1-CK-ct
[0611] Chain 4: nt-VK1-CK-ct

[0612] In addition, MAdCAM scFvs were also converted using standard molecular biology techniques (such as Gibson Cloning procedure) or gene synthesis into a bispecific format whereby an IL-2 mutein was situated at the c-terminus of the IgG heavy chain of the MAdCAM antibody, as outlined below:
[0613] Chain 1: nt-VH1-CH1-CH2-CH3-ct-Linker-IL-2 mutein
[0614] Chain 2: nt-VH1-CH1-CH2-CH3-ct-Linker-IL-2 mutein
[0615] Chain 3: nt-VK1-CK-ct
[0616] Chain 4: nt-VK1-CK-ct
   An ELISA was used to analyze binding of anti-MAdCAM scFvs to captured or plate bound human, cyno, and mouse MAdCAM. Biotinylated human and cyno MAdCAM were captured on a streptavidin coated plate, and mouse MAdCAM-Fc coated directly onto an immunosorbent plate. After a blocking step, the plates were washed and scFv in crude periplasmic lysate was applied to the plate surface. scFv binding was detected using an anti-V5 HRP conjugate. The assay was developed with TMB substrate and stopped with acid. The absorbance at 450 nm was measured. Appropriate wash steps were applied between each step of the ELISA. Human versus cyno and human versus mouse were evaluated. The scFv's were also analyzed using surface plasmon resonance technology. After being captured on a biosensor surface via the V5 tag, soluble monomeric human MAdCAM was titrated and both binding and dissociation measured and fit to a 1:1 binding model allowing the derivation of on and off-rates.

[0617] The results measured indicate that the majority of clones tested have human and cyno MAdCAM binding cross reactivity and a small panel have additional cross reactivity to mouse MAdCAM. Biosensor experiments demonstrated that the clones exhibited a range of binding on and off-rates against human MAdCAM with ka values ranging from 10³ 1/Ms through 10⁷ 1/Ms and k_{d} values ranging 10⁻¹ through 10⁻⁴ 1/s. Certain clones have an off-rate slower than 2×10e2 1/s. Thus, MadCAM antibodies were generated and can be used in a bispecific format.

### Example 25: Generation of Bispecific Human MAdCAM-Tethered IL-2 Muteins of Example 19

[0618] Two plasmids each were co-transfected at equimolar ratios. The first plasmid in each case encoded the light chain of Hu.MAdCAM and the second encoded the full length IgG1 heavy chain of Hu.MAdCAM with a C-terminally fused human IL-2 mutein comprising the L118I mutation as illustrated in the Table of MAdCAM-IL-2 Mutein Bispecific Compounds provided herein. After 3-5 days, cell culture supernatants expressing the Hu.MAdCAM-IL-2 mutein bispecifics was harvested, and clarified by centrifugation and filtration through a 0.22 μm filtration device. The Hu.MAdCAM-IL-2 mutein bispecifics were captured on proA resin. The resin was washed with PBS pH 7.4 and the captured proteins were eluted using 0.25% acetic acid pH 3.5, with neutralization using a tenth volume of 1M Tris pH 8.0. The proteins were buffer exchanged into 30 mM HEPES 150 mM NaCl pH 7, and analyzed by size exclusion chromatography on an AdvanceBio SEC column. Analysis of 1 ug of purified material by reducing and non-reducing SDS-PAGE on a Bis-Tris 4-12% gel was conducted. The Hu.MAdCAM-IL-2 mutein bispecifics expressed at over 10 mg/L, and was over 95% monodispersed after purification as shown by size exclusion chromatography and reducing/non-reducing SDS-PAGE. Thus, these results demonstrate that fully human dual function bispecific molecules with immunomodulators at the C-terminus can be produced.

### Example 26: Durability of Signaling Induced by IL-2 Muteins

[0619] Peripheral blood mononuclear cells (PBMCs) were prepared using FICOLL-PAQUE Premium and Sepmate tubes from freshly isolated heparinized human whole blood. PBMCs were cultured in 10% fetal bovine serum RPMI medium in the presence of IL-2 muteins for 60 minutes. Cells were then wash 3 times and incubated for an additional 3 hours. Cells were then fixed for 10 minutes with BD Cytofix. Fixed cells were sequentially permeabilized with BD Perm III and then BioLegend FOXP3 permeabilization buffer. After blocking with human serum for 10 minutes, cells were stained for 30 minutes with antibodies for phospho-STAT5 FITC, CD25 PE, FOXP3 AF647 and CD4 PerCP Cy5.5 and then acquired on an Attune NXT with plate reader. All four IL-2 muteins of Example 19 induced durable signaling in Treg but not in Teff as compared to the control. An IL-2 mutein of SEQ ID NO: 56 is superior to an IL-2 mutein of SEQ ID NO: 55, SEQ ID NO: 54 or SEQ ID NO: 53. These results demonstrate that the IL-2 can induce durable and selective signaling in Treg which should lead to greater Treg expansion in vivo and permit less frequent dosing to achieve Treg expansion.

### Example 27: In Vitro p-STAT5 Assay Demonstrates Activity and Selectivity of Bispecific Hu.MAdCAM-Tethered IL-2 Muteins when in Solution or when Tethered

[0620] Recombinant human MAdCAM was coated onto wells of a 96 well high binding plate (Corning) overnight. After washing 2 times with PBS, the plate was blocked for 1 hour with 10% FBS RPMI media. MAdCAM-tethered IL-2 mutein bispecifics or untethered IL-2 mutein control were captured for 1 hour. After washing 2 times with PBS, freshly isolated human PBMCs were stimulated for 60 minutes with captured IL-2 mutein or for comparison IL-2 mutein in solution. Cells were then fixed for 10 minutes with BD Cytofix, permeabilized sequentially with BD Perm III and BioLegend FOXP3 permeabilization buffer, blocked with human serum and stained for 30 minutes with antibodies against phospho-STAT5 FITC (CST), CD25 PE, FOXP3 AF647 and CD4 PerCP Cy5.5 (BD) and acquired on an Attune NXT with plate loader.

[0621] In solution, IL-2 mutein bispecifics tethered to human MAdCAM and the control have comparable activity and selectivity on Treg versus Teff. Plates coated with MAdCAM were able to capture bispecifics, and the captured/immobilized bispecifics were still able to selectively activate Tregs over Teffs. This example demonstrates that IL-2 mutein bispecifics targeting human MAdCAM can retain biological activity and selectivity when in solution or when captured/immobilized.

### Example 28. IL-2 Muteins Induce pSTAT5 in Human Tregs

[0622] Purified PBMC from heparinized whole blood from six healthy donors were treated with serial dilutions of a IL-2 mutein proteins comprising a sequence of SEQ ID NO: 59, wherein X₃ is I and X₁, X₂, and X₄ are L or a sequence of SEQ ID NO: 59, wherein X₄ is I and X₁, X₂, and X₃ are L at 37 C for 30 minutes. Cells were fixed, washed, permeabilized and washed. Cells were stained with antibodies that detect both surface markers and intracellular/nuclear markers (pSTAT5 and FOXP3). Data was collected on Attune NxT cytometer. Tregs were gated as mononuclear, singlet, CD3pos, CD4pos, CD25hi, FoxP3pos. The % of gated Tregs that express phosphorylated STAT5 was measured. Best-fit curves were fit to the dose-response of pSTAT5 and EC50 values were determined. Average EC50 values of all 6 donors were determined for IL-2 of SEQ ID NO: 59, wherein X₃ is I and X₁, X₂, and X₄ are L (37.26±7.30; n=16) and for IL-2 of SEQ ID NO: 59, wherein X₄ is I and X₁, X₂, and X₃ are L (23.11±5.35; n=15). The data demonstrate that the IL-2 muteins can induce pSTAT5 in human Tregs. The IL-2 comprising a sequence of SEQ ID NO: 59, wherein X₄ is I and X₁, X₂, and X₃ are L is more potent than the IL-2 sequence comprising SEQ ID NO: 39, but both are active across multiple populations of cells.

### Example 29: IL-2 Muteins Induce pSTAT5 in Monkey PBMCs In Vitro

[0623] Purified PBMC from heparinized whole blood from three healthy monkeys were treated with serial dilutions a IL-2 mutein protein comprising a sequence of SEQ ID NO: 59, wherein X₃ is I and X₁, X₂, and X₄ are L or a sequence of SEQ ID NO: 59, wherein X₄ is I and X₁, X₂, and X₃ are L at 37 C for 60 minutes. Fluorochrome conjugated Anti-CD25 and anti-CD4 were added for the final 30 min of the IL-2 mutein treatment. Cells were fixed, washed, permeabilized and washed. Cells were stained with remaining antibodies that detect both surface markers and intracellular/nuclear markers (pSTAT5 and FOXP3). Data was collected on Attune NxT cytometer. Tregs were gated as mononuclear, singlet, CD4pos, CD25hi, FoxP3pos. The % of gated Tregs that express phosphorylated STAT5 was measured. The IL-2 muteins were found to induce pSTAT5 in monkeys.

### Example 30: IL-2 Muteins Induce Expansion of Treg Cells and Induce Treg Proliferation In Vivo

[0624] Venous whole blood was collected in K2EDTA tubes from monkeys (cynomolgus) before dosing with IL-2 muteins of SEQ ID NO: 59, wherein X₃ is I and X₁, X₂, and X₄ are L or a sequence of SEQ ID NO: 59, wherein X₄ is I and X₁, X₂, and X₃ are L (2 timepoints/cyno, 5 cynos) and after dosing with either SEQ ID NO: 59, wherein X₃ is I and X₁, X₂, and X₄ are L (5 timepoints/cyno, 2 cynos) or SEQ ID NO: 59, wherein X₄ is I and X₁, X₂, and X₃ are L (5 timepoints/cyno, 3 cynos). Samples were divided in two and stained for two FACS panels separately. One was a “Treg panel” and one was a general immunophenotyping panel. RBCs were lysed and cells were stained for surface and intracellular markers after fixation and permeabilization. For the FACS analysis the number of total cells/μl was determined by ADVIA. The number of cells of a given subpopulation/μ1 was then calculated with the total number/ul and the % of total. For each monkey, the average number of a given cell type/μl of the two pre-dose bleeds was averaged and used to normalize the post-dose bleeds, such that “fold-change from pre-dose” was determined. To analyze serum cytokined and chemokines, plasma from K2EDTA whole blood was frozen until the end of the study. Chemokine and cytokine amounts were quantified by a multiplex MSD assay using serial dilutions of a standard control. The average and range of MCP-1 and IP-10 were determined in pre-dose bleeds. Both muteins were found to expand Treg and induce Treg proliferation in the monkeys. These results demonstrate that the IL-2 muteins function in an in vivo animal model that is similar to humans. It was also found that neither molecule significantly expanded Tconv cells, CD4 cells (naive T) or CD8 cells (Cytotoxic T), NK cells in the monkeys (non-human primate). It was also found that neither molecule significantly induced serum chemokines. This data demonstrates that the IL-2 muteins can expand Treg cells and induce Treg cell proliferation without unwanted expansion or activation of other pathways. Thus, the IL-2 muteins are surprisingly potent, effective, and selective for Treg expansion and proliferation.

[0625] In summary, the embodiments and examples provided herein demonstrate that the IL-2 muteins that can be targeted to certain tissues can function as intended and be used to treat the diseases and conditions described herein. Furthermore, the examples provided for herein demonstrate the surprising and unexpected result that a bispecific molecule comprising a MAdCAM antibody and a IL-2 mutein can function to selectively and potently activate Tregs over Teffs, which demonstrates that the molecules can be used to treat or ameliorate the conditions described herein. The examples also demonstrate that the IL-2 mutein can function to selectively and potently activate Tregs over Teffs when used alone (or linked to a Fc protein) as provided for herein.

### Example 31: Antibodies Bind to MAdCAM

[0626] Certain antibodies provided for herein were tested for their ability to bind to MAdCAM. The following table provides the binding information against the various targets and other activities. The antibodies, in either scFv or IgG format, which were tested for their ability to bind to human or mouse cells expressing MadCAM as well as binding to cyno MadCAM protein. The results are presented either as “−” for no significant binding or as binding at different levels (e.g., “+”, “++”, and “+++”).

Activities of MADCAM Antibodies from Table 1

| Clone ID | | | | | | | | | | |
|---|---|---|---|---|---|---|---|---|---|---|
| as in | | | MAdCAM | | | | Cell-Based | | | |
| MAdCAM | MAdCAM Cell | | Binding | | | | Integrin | | ELISA Integrin | |
| Ab | Binding | | ELISA | MAdCAM Octet Binding | | | Blockade | | Blockade | |
| Table 1 | Human | Mouse | Cyno | Human | Cyno | Mouse | Human | Mouse | Human | Mouse |
| 1. | +++ | ++ | NT | +++ | +++ | 0.16 | − | NT | − | + |
| 2. | ++ | +++ | NT | + | +++ | +++ | + | − | NT | − |
| 3. | ++ | +++ | ++ | NT | NT | NT | + | NT | NT | NT |
| 4. | +++ | +++ | NT | + | +++ | +++ | + | − | + | + |
| 5. | +++ | +++ | NT | ++ | +++ | +++ | − | NT | − | + |
| 6. | +++ | − | NT | +++ | +++ | NB | + | NT | + | NT |
| 7. | ++ | +++ | NT | + | +++ | +++ | + | NT | NT | + |
| 8. | +++ | − | +++ | NT | NT | NT | + | NT | NT | NT |
| 9. | +++ | +++ | NT | +++ | +++ | +++ | − | NT | − | + |
| 10. | +++ | − | +++ | NT | NT | NT | + | NT | NT | NT |
| 11. | +++ | − | +++ | NT | NT | NT | + | NT | NT | NT |
| 12. | +++ | − | +++ | NT | NT | NT | + | NT | NT | NT |
| 13. | +++ | − | +++ | NT | NT | NT | + | NT | NT | NT |
| 14. | +++ | − | +++ | NT | NT | NT | + | NT | NT | NT |
| 15. | +++ | − | +++ | NT | NT | NT | − | NT | NT | NT |
| 16. | +++ | − | +++ | NT | NT | NT | + | NT | NT | NT |
| 17. | +++ | − | +++ | NT | NT | NT | + | NT | NT | NT |
| 18. | +++ | − | +++ | NT | NT | NT | + | NT | NT | NT |
| 19. | +++ | − | NT | +++ | +++ | − | − | NT | + | NT |
| 20. | +++ | − | NT | +++ | +++ | − | + | NT | − | NT |
| 21. | +++ | − | +++ | NT | NT | NT | + | NT | NT | NT |
| 22. | ++ | − | +++ | NT | NT | NT | + | NT | NT | NT |
| 23. | +++ | − | NT | +++ | +++ | − | − | NT | − | NT |
| 24. | +++ | − | +++ | NT | NT | NT | + | NT | NT | NT |
| 25. | + | − | +++ | NT | NT | NT | NT | NT | NT | NT |
| 26. | ++ | − | +++ | NT | NT | NT | + | NT | NT | NT |
| 27. | +++ | − | +++ | NT | NT | NT | + | NT | NT | NT |
| 28. | ++ | − | +++ | NT | NT | NT | + | NT | NT | NT |
| 29. | +++ | − | +++ | NT | NT | NT | + | NT | NT | NT |
| 30. | ++ | − | +++ | NT | NT | NT | + | NT | NT | NT |
| 31. | +++ | − | +++ | NT | NT | NT | + | NT | NT | NT |
| 32. | +++ | − | +++ | NT | NT | NT | + | NT | NT | NT |
| 33. | ++ | − | +++ | NT | NT | NT | + | NT | NT | NT |
| 34. | +++ | − | +++ | NT | NT | NT | + | NT | NT | NT |
| 35. | +++ | − | +++ | NT | NT | NT | − | NT | NT | NT |
| 36. | +++ | − | +++ | NT | NT | NT | + | NT | NT | NT |
| 37. | +++ | − | NT | NT | NT | NT | + | NT | NT | NT |
| 38. | ++ | − | +++ | NT | NT | NT | + | NT | NT | NT |
| 39. | +++ | − | +++ | NT | NT | NT | + | NT | NT | NT |
| 40. | +++ | − | +++ | NT | NT | NT | + | NT | NT | NT |
| 41. | +++ | − | +++ | NT | NT | NT | + | NT | NT | NT |
| 42. | +++ | − | ++ | NT | NT | NT | + | NT | NT | NT |
| 43. | +++ | − | +++ | NT | NT | NT | + | NT | NT | NT |
| 44. | +++ | − | +++ | NT | NT | NT | + | NT | NT | NT |
| 45. | +++ | − | +++ | NT | NT | NT | + | NT | NT | NT |
| 46. | +++ | − | +++ | NT | NT | NT | + | NT | NT | NT |
| 47. | +++ | − | +++ | NT | NT | NT | + | NT | NT | NT |
| 48. | +++ | − | +++ | NT | NT | NT | + | NT | NT | NT |
| 49. | +++ | − | +++ | NT | NT | NT | + | NT | NT | NT |
| 50. | +++ | − | +++ | NT | NT | NT | − | NT | NT | NT |
| 51. | +++ | − | +++ | NT | NT | NT | − | NT | NT | NT |
| 52. | +++ | − | +++ | NT | NT | NT | + | NT | NT | NT |
| 53. | +++ | − | +++ | NT | NT | NT | − | NT | NT | NT |
| 54. | +++ | − | +++ | NT | NT | NT | + | NT | NT | NT |
| 55. | +++ | − | +++ | NT | NT | NT | + | NT | NT | NT |
| 56. | +++ | − | +++ | NT | NT | NT | + | NT | NT | NT |
| 57. | +++ | − | +++ | NT | NT | NT | − | NT | NT | NT |
| 58. | +++ | − | +++ | NT | NT | NT | − | NT | NT | NT |
| 59. | +++ | +++ | NT | +++ | +++ | +++ | + | + | + | − |
| 60. | +++ | ++ | NT | +++ | +++ | NT | − | NT | − | + |
| 61. | ++ | +++ | NT | +++ | +++ | NT | + | − | − | + |
| 62. | +++ | +++ | NT | ++ | +++ | NT | − | NT | − | + |
| 63. | ++ | +++ | NT | + | + | +++ | + | + | + | + |
| 64. | + | +++ | NT | ++ | + | NT | + | − | + | + |
| 65. | ++ | +++ | NT | + | +++ | NT | + | − | + | + |
| 66. | +++ | +++ | NT | ++ | + | NT | − | − | + | + |

Activities of MADCAM Antibodies from Table 2

| Clone ID | | | | | | | | | | |
|---|---|---|---|---|---|---|---|---|---|---|
| as in | | | | | | | Cell-Based | | ELISA | |
| MADCAM | MAdCAM Cell | | MAdCAM | | | | Integrin | | Integrin | |
| Ab | Binding | | Binding ELISA | MAdCAM Octet Binding | | | Blockade | | Blockade | |
| Table 2 | Human | Mouse | Cyno | Human | Cyno | Mouse | Human | Mouse | Human | Mouse |
| 1. | +++ | +++ | NT | NT | NT | NT | − | NT | NT | NT |
| 2. | ++ | +++ | ++ | NT | NT | NT | + | NT | NT | NT |
| 3. | ++ | +++ | ++ | NT | NT | NT | + | NT | NT | NT |
| 4. | +++ | +++ | NT | ++ | ++ | +++ | − | − | − | NT |
| 5. | +++ | +++ | NT | ++ | ++ | +++ | − | NT | − | NT |
| 6. | +++ | − | +++ | +++ | +++ | − | + | + | + | + |
| 7. | ++ | +++ | NT | − | − | +++ | NT | NT | − | NT |
| 8. | ++ | +++ | NT | − | +++ | +++ | NT | NT | − | NT |
| 9. | +++ | − | NT | NT | NT | NT | − | NT | − | − |
| 10. | +++ | ++ | NT | NT | NT | NT | − | NT | NT | NT |
| 11. | +++ | +++ | NT | +++ | +++ | +++ | − | NT | + | |
| 12. | +++ | − | +++ | NT | NT | NT | + | NT | + | + |
| 13. | +++ | − | NT | NT | NT | NT | NT | NT | NT | NT |
| 14. | + | − | NT | − | − | − | + | NT | − | + |
| 15. | +++ | − | NT | NT | NT | NT | − | NT | NT | NT |
| 16. | +++ | − | NT | NT | NT | NT | NT | NT | − | + |
| 17. | +++ | − | NT | +++ | +++ | − | − | NT | + | |
| 18. | +++ | − | NT | NT | NT | NT | − | NT | + | + |
| 19. | +++ | − | NT | NT | NT | NT | NT | NT | NT | NT |
| 20. | +++ | − | NT | +++ | +++ | − | − | NT | NT | NT |
| 21. | +++ | − | NT | NT | NT | NT | NT | NT | NT | NT |
| 22. | +++ | − | NT | +++ | ++ | − | − | NT | + | + |
| 23. | +++ | − | NT | +++ | +++ | − | − | NT | + | + |
| 24. | ++ | − | NT | − | − | − | + | NT | + | + |
| 25. | +++ | − | NT | NT | NT | NT | NT | NT | NT | NT |
| 26. | ++ | − | NT | − | NT | NT | + | NT | + | + |
| 27. | ++ | − | NT | − | NT | NT | − | NT | | |
| 28. | + | − | NT | − | − | − | + | NT | + | + |
| 29. | + | − | NT | − | − | − | + | NT | + | + |
| 30. | +++ | + | NT | +++ | +++ | − | − | NT | NT | NT |
| 31. | +++ | − | NT | NT | NT | NT | NT | NT | NT | NT |
| 32. | +++ | − | NT | NT | NT | NT | NT | NT | − | + |
| 33. | + | − | NT | NT | NT | NT | NT | NT | NT | NT |
| 34. | +++ | − | +++ | NT | NT | NT | + | NT | − | + |
| 35. | + | − | NT | − | NT | NT | − | NT | − | + |
| 36. | +++ | + | NT | +++ | ++ | NT | − | NT | NT | NT |
| 37. | ++ | − | NT | NT | NT | NT | NT | NT | − | + |
| 38. | +++ | − | NT | NT | NT | NT | NT | NT | − | + |
| 39. | +++ | − | +++ | NT | NT | NT | + | NT | NT | NT |
| 40. | ++ | − | NT | NT | NT | NT | NT | NT | + | − |
| 41. | ++ | − | NT | NT | NT | NT | NT | NT | − | − |
| 42. | +++ | − | +++ | NT | NT | NT | + | NT | + | − |
| 43. | +++ | − | +++ | NT | NT | NT | + | NT | − | − |
| 44. | ++ | − | NT | NT | NT | NT | NT | NT | + | − |
| 45. | +++ | − | NT | ++ | +++ | NT | − | NT | + | + |
| 46. | +++ | − | +++ | +++ | inconclusive | − | − | NT | + | − |
| 47. | +++ | − | +++ | NT | NT | NT | + | NT | − | − |
| 48. | +++ | − | ++ | NT | NT | NT | + | NT | NT | NT |
| 49. | +++ | − | +++ | NT | NT | NT | + | NT | NT | NT |
| 50. | +++ | − | NT | NT | NT | NT | NT | NT | NT | NT |
| 51. | ++ | − | +++ | NT | NT | NT | + | NT | NT | NT |
| 52. | +++ | − | NT | NT | NT | NT | NT | NT | NT | NT |
| 53. | + | − | + | NT | NT | NT | + | NT | NT | NT |
| 54. | +++ | − | +++ | NT | NT | NT | + | NT | NT | NT |
| 55. | +++ | − | NT | ++ | +++ | NT | − | NT | NT | NT |
| 56. | +++ | − | ++ | NT | NT | NT | + | NT | NT | NT |
| 57. | +++ | − | NT | NT | NT | NT | − | NT | NT | NT |
| 58. | +++ | − | NT | +++ | +++ | NT | − | NT | NT | NT |
| 59. | +++ | − | +++ | NT | NT | NT | + | NT | NT | NT |
| 60. | +++ | ++ | NT | +++ | +++ | − | − | NT | NT | NT |
| 61. | +++ | − | NT | NT | NT | NT | NT | NT | NT | NT |
| 62. | +++ | − | NT | NT | NT | NT | − | NT | NT | NT |
| 63. | +++ | − | NT | +++ | +++ | NT | − | NT | NT | NT |
| 64. | +++ | − | +++ | NT | NT | NT | + | NT | NT | NT |
| 65. | +++ | − | NT | +++ | +++ | − | − | NT | NT | NT |
| 66. | +++ | − | + | NT | NT | NT | + | NT | NT | NT |
| 67. | +++ | − | NT | NT | NT | NT | NT | NT | NT | NT |
| 68. | +++ | − | NT | NT | NT | NT | NT | NT | NT | NT |
| 69. | +++ | − | +++ | NT | NT | NT | + | NT | NT | NT |
| 70. | +++ | − | NT | NT | NT | NT | NT | NT | NT | NT |
| 71. | +++ | − | NT | NT | NT | NT | NT | NT | NT | NT |
| 72. | +++ | − | + | NT | NT | NT | + | NT | NT | NT |
| 73. | +++ | − | NT | NT | NT | NT | NT | NT | NT | NT |
| 74. | +++ | − | NT | +++ | +++ | − | − | NT | NT | NT |
| 75. | +++ | +++ | +++ | +++ | +++ | +++ | + | + | NT | NT |
| 76. | +++ | +++ | NT | +++ | +++ | NT | − | | NT | NT |
| 77. | +++ | ++ | NT | − | NT | NT | − | − | NT | NT |
| 78. | +++ | +++ | NT | +++ | +++ | NT | − | | NT | NT |
| 79. | +++ | +++ | NT | + | + | +++ | + | − | NT | NT |
| 80. | ++ | − | NT | − | NT | NT | + | + | NT | NT |
| 81. | ++ | +++ | NT | − | NT | NT | − | − | NT | NT |
| 82. | +++ | +++ | NT | ++ | +++ | NT | − | − | NT | NT |
| 83. | +++ | ++ | NT | ++ | +++ | NT | − | NT | NT | NT |
| 84. | +++ | ++ | NT | +++ | +++ | NT | − | NT | NT | NT |

### Example 32: A Bispecific Molecule Comprising a MAdCAM Antibody and an IL-2 Mutein Specifically Localize to High Endothelial Venules (HEV) in Gut after s.c. Dosing in Mice

[0627] Mice were dosed s.c. with untethered IL-2 mutein or MAdCAM-tethered IL-2 mutein. Intestinal tissues were harvested 4 days later, and stained for human IgG1 (to detect the test article Ig backbone of both the untethered and tethered molecules, or MECA367 (to detect MAdCAM-expressing HEV). It was found that only the MAdCAM-tethered IL-2 mutein molecule specifically localized to the HEV whereas the unethether IL-2 mutein did not show detectable or significant localization at the same tissues.

### Example 33: Bispecific MadCAM-IL2M do not Block MADCAM:α4/β7 Interactions and Therefore do not Affect Cell Trafficking

[0628] A MAdCAM-tethered IL-2 mutein molecule was tested to determine whether it blocks α4/β7 integrin binding to MAdCAM. The assay demonstrated that it did not. It was also found that the bispecific did not, therefore, have an impact on cell trafficking. The binding activity was performed by ELISA or a cell interaction assay.

### Example 34: IL-2 Mutein Tethered to MAdCAM Antibody is Functional

[0629] CHO cells were transfected with human or mouse MAdCAM to generate MAdCAM-expressing CHO cells that were then grown on a plate. The test article was added, allowed to bind, then unattached test article was washed out. Human PBMC were added and 30 minutes later evaluated by FACS for phosphorylation of STAT5 Tregs were pSTAT5+ revealing activation by IL-2 mutein, Tconv cells remained unactivated, despite presumed high local concentration of the bispecific on cell surface.

### Example 35: MAdCAM-Tethered-IL2 Mutein Ameliorates Weight Loss in TNBS-Induced Colitis in Humanized Mice, Similar to Low-Dose IL-2

[0630] Mice were sensitized with TNBS D-7, primed with TNBS D0. Mice were dosed daily with low doses of IL-2 (positive control) or vehicle (negative control) from D-7 to D3. Mice dosed with the MAdCAM-tethered-IL2 mutein D-7 and D0. It was found that the attenuation of weight loss by the MAdCAM-tethered-IL2 mutein was similar to attenuation of weight loss by LD IL-2. Therefore, these results demonstrate that the tethered approach is functional even though it is specifically localizes to HEV as shown in the previous examples.

[0631] The format of the MAdCAM-tethered-IL2 mutein as described in Examples 22-24 was where the MAdCAM component was an IgG with IL-2 mutein moiety fused at the C-terminus of the heavy chain. The IL-2 mutein, however, had a Fc portion at its N-terminus as described herein, such as SEQ ID NO: 56 The format of the bispecific is a multiple chain polypeptides, which can be represented in the following format: Heavy Chain: NT-[VH_MAdCAM]-[CH1-CH2-CH3]-[Linker_B]-[IL-2 Mutein]-CT, wherein NT=N-terminus

[VH_MAdCAM]=Any VH domain provided for herein or a VH domain comprising the CDR1, CDR2, or CDR3 as described in MadCAM Antibody Table 1 or 2;
[CH1-CH2-CH3]=the Human IgG1 Constant Heavy 1 (CH1), Constant Heavy 2 (CH2), and Constant Heavy 3 (CH3) domains, which can have a sequence of:

(SEQ ID NO: 44)
ASTKGPSVFPLAPSSKSTSGGTAALGCLVKDYFPEPVTVSWNSGALTS
GVHTFPAVLQSSGLYSLSSVVTVPSSSLGTQTYICNVNHKPSNTKVDK
KVEPKSCDKTHTCPPCPAPEAAGAPSVFLFPPKPKDTLMISRTPEVTC
VVVDVSHEDPEVKFNWYVDGVEVHNAKTKPREEQYNSTYRVVSVLTVL
HQDWLNGKEYKCKVSNKALPAPIEKTISKAKGQPREPQVYTLPPSREE
MTKNQVSLTCLVKGFYPSDIAVEWESNGQPENNYKTTPPVLDSDGSFF
LYSKLTVDKSRWQQGNVFSCSVMHEALHNHYTQKSLSLSPG;

[Linker_B]=GGGGS (SEQ ID NO: 23), which could also be GGGGSGGGGSGGGGS (SEQ ID NO: 30);
[IL-2_Mutein]=Any IL2 mutein provided for herein, including but not limited to SEQ ID NO: 56; and

### CT=C-terminus.

[0632] The molecule can also have a light chain format of:
Light Chain: NT-[VK_MAdCAM]-[CK]-CT, wherein

### NT=N-terminus;

[0633] [VK_MAdCAM]=as illustrated in MAdCAM Antibody Table 1 or 2;
[CK]=Human constant kappa domain, which can have a sequence of:

(SEQ ID NO: 45)
RTVAAPSVFIFPPSDEQLKSGTASVVCLLNNFYPREAKVQWKVDNALQ
SGNSQESVTEQDSKDSTYSLSSTLTLSKADYEKHKVYACEVTHQGLSS
PVTKSFNRGEC;
and CT = C-terminus.

### Example 36: Various MAdCAM Antibodies were Tested for the Ability to Bind to Different Species of MAdCAM

[0634] The antibodies containing the CDRs of antibody 6, antibody 59, antibody 63 of Table 1. Although the antibody was tested in a scFV format as illustrated in MAdCAM Antibody Table 1, the MAdCAM antibody can also be as shown in MAdCAM Antibody Table 2 in the traditional VH/VL format. The antibodies were found to be at able to bind to both human and cyno MAdCAM, and except for Antibody Clone 6 they could also bind to mouse MAdCAM. The antibodies can bind MAdCAM with a K_{D} in the nanomolor to micromolar range.

### Example 37: Epitope Mapping of Antibodies

[0635] Human or murine MAdCAM-avitag/polyhistidine tag was immobilized on penta-his biosensors at 0.5 ug/mL for 180s. Baseline step was established in assay buffer (1% BSA with 0.05% Tween-20 in 1×PBS) for 120 seconds. First step of association was performed in wells with 40 nM molecules comprising the antibody CDRs of antibody 6, antibody 59, antibody 63 of Table 1 and other the MAdCAM antibodies, from PF-00547659 (an integrin blockign antibody; (Pfizer; Pullen et al., Br J Pharmacol. 2009 May; 157(2):281-93), MECA89 (a non-integrin blocker), and MECA367 (an integrin blocker).

[0636] It was found that Antibody 59 of Table 1 competes with Antibody 6 for human MAdCAM binding. Antibody 63 of Table 1 did not compete with Antibody 59 or Antibody 6 of Table 1 for human MAdCAM binding. Antibody 63 competed with Pfizer benchmark antibody while the others did not compete with Pfizer benchmark antibody. The results also showed that Antibody 59 did not compete with Antibody 63 for mouse MAdCAM binding. Antibody 63 competed with MECA367 but not MECA89. Antibody 59 competed with MECA89 but not MECA367. This data illustrates that the antibodies bind to different epitopes.

### Example 38: Identification of Abs that can Function as PD-1 Agonists

[0637] PD-1 component antibodies were screened in 3 formats. The primary format was PD-1 ML-N whereby the PD-1 agonist component was a PD-1 IgG with an anti-MAdCAM moiety placeholder fused at the C-terminus of the heavy chain. The MAdCAM scFv was a “placeholder” scFv called MECA89 which is a rat anti-mouse MAdCAM antibody. However, the placeholder Ab could be replaced with another MAdCAM antibody described herein. The following table provides the data for the different antibody clones described herein:

| | | | | | | | | Mouse | | | |
|---|---|---|---|---|---|---|---|---|---|---|---|
| | | | | | | | | agonist- | | | |
| | | | | | | | Mouse | CTG: | | | |
| | | | | | | | agonist- | IC50 (avg. | | | |
| | | | | | | | CTG | PD-L1 = 2.4 nM) | | | |
| | Antagonist bin | | | Captured Agonist | | | ++; +; − | ++; +; − | Soluble Agonist | | |
| | Strong; Moderate; | | | +++; ++; +; − | | | (Yes; Weak; | (<10 nM; <100 | ++; +; − (Yes; | | |
| Clone | Weak; None | | | (>0.75; >0.5; >0.25; >0) | | | No) | nM; >100 nM) | Weak/Maybe; No) | | |
| (scFv) | IgG1 | MLC | MLN | IgG1 | MLC | MLN | IgG1 | IgG1 | IgG1 | MLC | MLN |
| PD1AB1 | −− | −− | − | + | − | − | | | ++ | | |
| PD1AB2 | − | −− | + | + | − | + | | | ++ | | |
| PD1AB3 | −− | | | + | | − | | | | | |
| PD1AB4 | − | | | + | | | ++ | ++ | ++ | | |
| PD1AB5 | + | −− | + | + | − | + | | | ++ | | |
| PD1AB6 | + | −− | − | ++ | + | − | ++ | ++ | ++ | | |
| PD1AB7 | − | −− | | + | − | | ++ | ++ | ++ | | |
| PD1AB8 | − | | + | + | | + | | | ++ | | |
| PD1AB9 | −− | | − | + | | | | | ++ | | |
| PD1AB10 | + | −− | + | + | − | | | | ++ | | |
| PD1AB11 | −− | | − | + | | | | | ++ | | |
| PD1AB12 | −− | −− | −− | + | − | − | | | | | |
| PD1AB13 | −− | −− | − | + | − | | | | ++ | | |
| PD1AB14 | −− | −− | −− | + | − | | | | ++ | | |
| PD1AB15 | −− | | − | + | | + | | | | | − |
| PD1AB16 | −− | −− | −− | − | − | + | | | ++ | | − |
| PD1AB17 | − | | N/T | +++ | | +++ | | | | | − |
| PD1AB18 | −− | N/T | − | ++ | | − | ++ | ++ | ++ | | |
| PD1AB19 | − | −− | + | − | − | + | | | ++ | | |
| PD1AB20 | −− | −− | − | ++ | − | − | ++ | ++ | ++ | | |
| PD1AB21 | −− | −− | −− | ++ | − | − | | | ++ | | |
| PD1AB22 | + | | − | + | | | ++ | ++ | ++ | | |
| PD1AB23 | −− | −− | −− | + | − | − | + | ++ | ++ | | |
| PD1AB24 | − | | −− | + | | | | | ++ | | |
| PD1AB25 | − | −− | + | +++ | + | +++ | | | ++ | | |
| PD1AB26 | −− | −− | N/T | + | − | | | | ++ | | |
| PD1AB27 | −− | −− | −− | + | − | | | | | | |
| PD1AB28 | − | | + | + | | − | | | ++ | | |
| PD1AB29 | − | −− | − | +++ | − | + | | | | | |
| PD1AB30 | − | − | + | +++ | + | ++ | | | ++ | | |
| PD1AB31 | + | | − | + | | − | | | | | |
| PD1AB32 | − | −− | − | − | − | + | | | | | |

### Example 39: MAdCAM-PD1 Agonist Bispecifics do not Self Associate

[0638] Gold nanoparticles were coated with a mixture of anti-human IgG Fc and polyclonal goat nonspecific antibody. The antibodies of interest were then incubated with the particles for 2 hours and the absorbance at all wavelengths was measured. The self-interacting control antibody showed a wavelength shift. MAdCAM-PD1 agonist bispecific antibodies, similarly to control buffer (1×PBS) or control antibody, did not show a wavelength shift. This data demonstrates that the bi-specific antibody does not self-associate.

### Example 45: MAdCAM-PD1 Agonist Bispecifics are Specific for Binding to MAdCAM and PD-1 by Human Protein Array (Retrogenix)

[0639] 5528 expression vectors, encoding both ZsGreen1 and full-length human plasma membrane proteins or a cell-surface tethered human secreted protein, were arrayed in duplicate across 16 microarray slides. Human HEK293 cells were used for reverse transfection/expression. The test antibodies were added to each slide after cell fixation. Detection of binding was performed by using the same fluorescent secondary antibody as used in the Pre-screen. Fluorescent images were analysed and quantitated (for transfection) using ImageQuant software. A protein ‘hit’ is defined as a duplicate spot showing a raised signal compared to background levels. This is achieved by visual inspection using the images gridded on the ImageQuant software. Hits were classified as ‘strong, medium, weak or very weak’, depending on the intensity of the duplicate spots. Test molecule comprising MAdCAM Antibody 59 and PD-1 Antibody PD1AB30 was found to specifically interact with its two primary targets only—PDCD1 (medium/strong) and MADCAM1 (strong) only. No other significant interactions were detected. These results demonstrate that the bi-specific molecule is able to bind to its respective targets.

### Example 47: MAdCAM-PD1 Agonist Bispecifics Prolong Survival in a xGVHD Mouse Model

[0640] NOD scid gamma (NSG) mice were grafted with a human PBMC and treated once per week with vehicle of MAdCAM-PD1 agonist bispecific antibody. Mice were euthanized when body weight loss exceeded 20% of starting body weight. Treatment with MAdCAM-PD1 bispecific antibodies resulted in prolonged survival, as compared to vehicle.

### Example 48: MAdCAM-PD1 Agonist Bispecifics Exhibit PD-1 Agonist Activity

[0641] Parental or MAdCAM (human or mouse) expressing CHO cells were pre-incubated with test articles then washed. PD-1 reporter Jurkat cells were added and SHP-2 recruitment was assessed after 2 hours. Similarily to PD-1 agonist CC-90006 (Celgene/Anaptys), MAdCAM-PD1 agonist bispecifics, consisting of PD-1 Antibody Clone PD1AB4 or PD1AB30 and MAdCAM Antibody Clone 75, showed increased chemilunisescence in human and mouse CHO cells, but not parental CHO cells, and as compared o TTJ2 IgG.

### Example 49: MAdCAM-PD1 Agonist Bispecific Reduces TNF-α Levels in Colon Tissue from Xenogeneic Graft-Versus-Host-Disease Mice

[0642] Immunocompromised NSG mice were engrafted with human PBMCs 24 days prior to treatment. Mice were treated with MADCAM-PD1 agonist bispecific (0.3 mg/kg) for one week and sacrificed. Colon tissues were homogenized and TNF-α concentrations were measured by ELISA in colon lysate. Values were normalized to total protein concentration to account for differences in tissue aliquot sizes. Vehicle and untethered PD-1 antibody had TNF-alpha levels in the colon lysate of 0.679±0.186 and 0.843±0.172 (pg/mg) S.E.M), respectively, whereas the bispecific MAdCAM-PD1 Antibody, consisting of MAdCAM Antibody 75 linked to PD-1 Antibody PD1AB4, saw levels of TNF-alpha that were less (0.386±0.157 (pg/mg)±S.E.M). Therefore, the bi-specifics and targeted to the colon expressing MAdCAM can reduce production of TNF-alpha in site specific manner. Reduced levels of this pro-inflammatory cytokines in the target tissue implies a therapeutic effect of MADCAM-PD-1 and an induction immune tolerance.

[0643] These data demonstrate that the Ab can act as an agonist when bound to targeting moiety such as a MAdCAM Ab. The antibodies can also be linked to IL-2 muteins or other moieties as provided herein.

[0644] The Examples provided herein demonstrate that molecules provided herein can be used to specifically localize therapeutics, such as an IL-2 mutein, PD-1 agonist, or CD39 moiety, and also other therapeutic molecules, such as those described herein.

[0645] The disclosures of each and every patent, patent application, and publication cited herein are hereby incorporated herein by reference in their entirety. While various embodiments have been disclosed with reference to specific aspects, it is apparent that other aspects and variations of these embodiments may be devised by others skilled in the art without departing from the true spirit and scope of the embodiments. The appended claims are intended to be construed to include all such aspects and equivalent variations.

1. A polypeptide comprising an anti-MAdCAM antibody and an anti-PD-1 antibody, wherein the polypeptide comprises a first polypeptide and a second polypeptide, wherein:
the first polypeptide comprises a variable heavy chain domain that binds to PD-1 with a variable light chain domain of the second polypeptide linked, directly or indirectly, to the anti-MAdCAM antibody; and
the second polypeptide comprises the variable light chain domain that binds to PD-1 with the variable heavy domain of the first polypeptide.

2. The polypeptide of claim 1, wherein:
the first polypeptide has a formula of:
V_{H}-H_{c}-Linker-C₁, wherein:
VH is the variable heavy domain that binds to PD-1 with the variable light chain domain;
H_{c} is a heavy chain of antibody comprising a CH1-CH2-CH3 domain,
the Linker is a peptide linker,
and C₁ is the anti-MAdCAM antibody; and

3. The polypeptide of claim 1, wherein the second polypeptide has the formula of:
V_{L}-L_{c}, wherein:
V_{L} is the variable light chain domain; and
L_{c} is a light chain domain.

4. The polypeptide of claim 1, wherein the peptide linker is a glycine/serine linker.

5. (canceled)

6. The polypeptide of claim 1, wherein the anti-MAdCAM antibody is an scFV antibody, wherein the scFV antibody has a formula of:
VH_{SC}-L_{SC}-VL_{SC}, wherein:
VH_{SC} comprises a variable heavy chain domain that binds to MAdCAM in conjunction with the VL_{SC};
L_{SC} is a peptide linker; and
VL_{SC} comprises a variable light chain domain that binds to MAdCAM in conjunction with the VH_{SC}.

7. (canceled)

8. The polypeptide of claim 1, wherein:
the first polypeptide has a formula of:
V_{H}-H_{c}-Linker-C₁, wherein:
V_{H} is the variable heavy domain that binds to PD-1 with the variable light chain domain;
H_{c} is a heavy chain of antibody comprising a CH1-CH2-CH3 domain,
the Linker is a peptide linker,
and C₁ is the anti-MAdCAM antibody; and
the second polypeptide has the formula of:
V_{L}-L_{c}, wherein:
V_{L} is the variable light chain domain; and
Lc is a light chain domain.

9-13. (canceled)

14. The polypeptide of claim 1, wherein the anti-MAdCAM antibody comprises a sequence as illustrated in MAdCAM Antibody Table 1 or 2.

15. The polypeptide of claim 1, wherein the PD-1 antibody comprises a sequence as illustrated in PD-1 Antibody Table 4 or PD-1 Antibody Table 5.

16-17. (canceled)

18. The polypeptide of claim 1, wherein the anti-MAdCAM antibody comprises a heavy chain variable region, wherein the heavy chain variable region is a heavy chain variable region of Clone ID: 6, 75, or 79 of MAdCAM Ab Table 2.

19. The polypeptide of claim 1, wherein the anti-MAdCAM antibody comprises a heavy chain variable region, wherein the heavy chain variable comprises the CDRs of the heavy domain of 6, 75, or 79 of MAdCAM Ab Table 2.

20. (canceled)

21. The polypeptide of claim 1, wherein the anti-MAdCAM antibody comprises a heavy chain variable region, wherein the heavy chain variable region comprises:
a first CDR of SEQ ID NO: 359, a second CDR of SEQ ID NO: 170, and a third CDR of SEQ ID NO: 360;
a first CDR of SEQ ID NO: 90, a second CDR of SEQ ID NO: 91, and a third CDR of SEQ ID NO: 92; or
a first CDR of SEQ ID NO: 135, a second CDR of SEQ ID NO: 381, and a third CDR of SEQ ID NO: 382.

22. (canceled)

23. The polypeptide of claim 1, wherein the anti-MAdCAM antibody comprises a light chain variable region that comprises a sequence of SEQ ID NO: 415, SEQ ID NO: 592 or SEQ ID NO: 600 or a VL sequence as provided for in MAdCAM Ab Table 2.

24. The polypeptide of claim 22, wherein the anti-MAdCAM antibody comprises a light chain variable region comprising:
a first CDR of SEQ ID NO: 361, a second CDR of SEQ ID NO: 362, and a third CDR of SEQ ID NO: 363;
a first CDR of SEQ ID NO: 93, a second CDR of SEQ ID NO: 87, and a third CDR of SEQ ID NO: 94; or
a first CDR of SEQ ID NO: 383, a second CDR of SEQ ID NO: 384, and a third CDR of SEQ ID NO: 385.

25. (canceled)

26. The polypeptide of claim 1, wherein the anti-PD-1 antibody heavy chain variable region is a heavy chain variable region as provided for in PD-1 Antibody Table 4.

27. The polypeptide of claim 1, wherein the anti-PD-1 antibody heavy chain variable region is a heavy chain variable region of Clone ID: PD1AB4 (SEQ ID NO: 637), PD1AB30 (SEQ ID NO: 769), PD1AB17 (SEQ ID NO: 704), PD1AB18 (SEQ ID NO: 710), PD1AB20 (SEQ ID NO: 724), PD1AB25 (SEQ ID NO: 755) of PD-1 Antibody Table 4.

28. (canceled)

29. The polypeptide of claim 1, wherein the anti-PD-1 antibody heavy chain variable region comprises a first CDR of SEQ ID NO: 639, 757, 706, 712, or 726, 757, a second CDR of SEQ ID NO: 69, 758, 707, 713, 727, or 758 and a third CDR of SEQ ID NO: 640, 759, 708, 714, 728, or 759.

30. The polypeptide of claim 1, wherein the anti-PD-1 antibody heavy chain variable region comprises:
a first CDR of SEQ ID NO: 639, a second CDR of SEQ ID NO: 69, and a third CDR of SEQ ID NO: 640;
a first CDR of SEQ ID NO: 757, a second CDR of SEQ ID NO: 758, and a third CDR of SEQ ID NO: 759;
a first CDR of SEQ ID NO: 706, a second CDR of SEQ ID NO: 707, and a third CDR of SEQ ID NO: 708;
a first CDR of SEQ ID NO: 712, a second CDR of SEQ ID NO: 713, and a third CDR of SEQ ID NO: 714; or
a first CDR of SEQ ID NO: 726, a second CDR of SEQ ID NO: 727, and a third CDR of SEQ ID NO: 728.

31. The polypeptide of claim 1, wherein the anti-PD-1 antibody light chain variable region is a light chain variable region of Clone ID: PD1AB4 (SEQ ID NO: 638), PD1AB30 (SEQ ID NO: 756), PD1AB17 (SEQ ID NO: 705), PD1AB18 (SEQ ID NO: 711), PD1AB20 (SEQ ID NO: 725), PD1AB25 (SEQ ID NO: 756) of PD-1 Antibody Table 4.

32. (canceled)

33. The polypeptide of claim 1, wherein the anti-PD-1 antibody light chain variable region comprises a first CDR of SEQ ID NO: 641, 709, 715, 729, or 760 a second CDR of SEQ ID NO: 362, 716, 420, or 378, and a third CDR of SEQ ID NO: 642, 421, 717, 730, or 761.

34. The polypeptide of claim 1, wherein the anti-PD-1 antibody light chain variable region comprises:
a first CDR of SEQ ID NO: 641, a second CDR of SEQ ID NO: 362, and a third CDR of SEQ ID NO: 642;
a first CDR of SEQ ID NO: 709, a second CDR of SEQ ID NO: 362, and a third CDR of SEQ ID NO: 421;
a first CDR of SEQ ID NO: 715, a second CDR of SEQ ID NO: 716, and a third CDR of SEQ ID NO: 717;
a first CDR of SEQ ID NO: 729, a second CDR of SEQ ID NO: 420, and a third CDR of SEQ ID NO: 730; or
a first CDR of SEQ ID NO: 760, a second CDR of SEQ ID NO: 378, and a third CDR of SEQ ID NO: 761.

35. The polypeptide of claim 1, wherein the anti-PD-1 antibody comprises:
a heavy chain variable region comprising a first CDR of SEQ ID NO: 639, a second CDR of SEQ ID NO: 69, and a third CDR of SEQ ID NO: 640 and a light chain variable region comprising a first CDR of SEQ ID NO: 641, a second CDR of SEQ ID NO: 362, and a third CDR of SEQ ID NO: 642;
a heavy chain variable region comprising a first CDR of SEQ ID NO: 757, a second CDR of SEQ ID NO: 758, and a third CDR of SEQ ID NO: 759 and a light chain variable region comprising a first CDR of SEQ ID NO: 760, a second CDR of SEQ ID NO: 378, and a third CDR of SEQ ID NO: 761;
a heavy chain variable region comprising a first CDR of SEQ ID NO: 706, a second CDR of SEQ ID NO: 707, and a third CDR of SEQ ID NO: 708 and a light chain variable region comprising a first CDR of SEQ ID NO: 709, a second CDR of SEQ ID NO: 362, and a third CDR of SEQ ID NO: 421;
a heavy chain variable region comprising a first CDR of SEQ ID NO: 712, a second CDR of SEQ ID NO: 713, and a third CDR of SEQ ID NO: 714 and a light chain variable region comprising a first CDR of SEQ ID NO: 715, a second CDR of SEQ ID NO: 716, and a third CDR of SEQ ID NO: 717;
a heavy chain variable region comprising a first CDR of SEQ ID NO: 726, a second CDR of SEQ ID NO: 727, and a third CDR of SEQ ID NO: 728 and a light chain variable region comprising a first CDR of SEQ ID NO: 729, a second CDR of SEQ ID NO: 420, and a third CDR of SEQ ID NO: 730; or
a heavy chain variable region comprising a first CDR of SEQ ID NO: 757, a second CDR of SEQ ID NO: 758, and a third CDR of SEQ ID NO: 759 and a light chain variable region comprising a first CDR of SEQ ID NO: 760, a second CDR of SEQ ID NO: 378, and a third CDR of SEQ ID NO: 761.

36-37. (canceled)

38. A polypeptide having a formula of:
PD1VH-ConstantDomain-LinkerA-MAdCAMscFv,
wherein the PD1VH is a PD-1 heavy chain variable domain of any PD-1 antibody provided for herein;
the ConstantDomain is an IgG1 constant domain, or any other constant domain such as IgG2, IgG3, or IgG4;
Linker A is a G/S or a G/A linker, such as those provided herein,
MAdCAMscFv is of the following formula:
MAdCAMVH-LinkerB-MAdCAMVK,
wherein MAdCAMVH is a MAdCAM heavy chain variable domain as provided herein;
Linker B is a G/S or a G/A linker, such as those provided herein; and
MAdCAMVK is a light chain variable domain as provided herein.

39-61. (canceled)

62. An antibody that binds to PD-1, wherein the antibody comprises a sequence as provided in PD-1 Antibody Table 4 or PD-1 Antibody Table 5.

63. The antibody of claim 62, or antigen binding fragment thereof, wherein the antibody, or antigen binding fragment thereof, comprises:
(i) a heavy chain variable region comprising heavy chain CDR1, CDR2, and CDR3 sequences, wherein the heavy chain CDR1 sequence has the amino acid sequence of any of the CDR1 sequences set forth in the PD-1 Antibody Table 4 or PD-1 Antibody Table 5; the heavy chain CDR2 has the amino acid sequence of any of the CDR2 sequences set forth in the PD-1 Antibody Table 4 or PD-1 Antibody Table 5, and the heavy chain CDR3 has the amino acid sequence of any of the CDR3 sequences set forth in the PD-1 Antibody Table 4 or PD-1 Antibody Table 5, or variants of any of the foregoing; and
(ii) a light chain variable region comprising light chain CDR1, CDR2, and CDR3 sequences, wherein the light chain CDR1 sequence has the amino acid sequence of any of the LCDR1 sequences set forth in the PD-1 Antibody Table 4 or PD-1 Antibody Table 5; the light chain LCDR2 has the amino acid sequence of any of the LCDR2 sequences set forth in the PD-1 Antibody Table 4 or PD-1 Antibody Table 5, and the light chain CDR3 has the amino acid sequence of any of the LCDR3 sequences set forth in PD-1 Antibody Table 4 or PD-1 Antibody Table 5, or variants of any of the foregoing.

64-77. (canceled)

78. The antibody of claim 62, wherein the antibody that binds to PD-1 is associated, either directly or indirectly, to another moiety.

79-85. (canceled)

86. A pharmaceutical composition comprising a polypeptide, protein, or an antibody of claim 1.

87. A method of treating a subject with a disorder the method comprising administering the polypeptide of claim 1 to the subject to treat the disorder, wherein the disorder is inflammatory bowel disease, Crohn's disease, ulcerative colitis, auto-immune hepatitis, primary sclerosing cholangitis, Type 1 diabetes, GVHD, or other auto-immune disorder described herein.

88-99. (canceled)

100. A nucleic acid encoding the polypeptide of claim 1.

101. (canceled)

102. A cell comprising the nucleic acid of claim 100.

103. A method of making a polypeptide of claim 1 comprising culturing a cell comprising a nucleic acid molecule encoding the polypeptide to make the a polypeptide.

104. (canceled)

The application's sequence listing, which the Patent Office published only in electronic form, follows.

SEQUENCE LISTING (888 sequences)

SEQ ID NO: 1 - protein, 510 aa, Homo sapiens
MEDTKESNVKTFCSKNILAILGFSSIIAVIALLAVGLTQNKALPENVKYGIVLDAGSSHTSLYIYKWPAEKENDTGVVHQVEECRVKGPGISKFVQKVNEIGIYLTDCMERAREVIPRSQHQETPVYLGATAGMRLLRMESEELADRVLDVVERSLSNYPFDFQGARIITGQEEGAYGWITINYLLGKFSQKTRWFSIVPYETNNQETFGALDLGGASTQVTFVPQNQTIESPDNALQFRLYGKDYNVYTHSFLCYGKDQALWQKLAKDIQVASNEILRDPCFHPGYKKVVNVSDLYKTPCTKRFEMTLPFQQFEIQGIGNYQQCHQSILELFNTSYCPYSQCAFNGIFLPPLQGDFGAFSAFYFVMKFLNLTSEKVSQEKVTEMMKKFCAQPWEEIKTSYAGVKEKYLSEYCFSGTYILSLLLQGYHFTADSWEHIHFIGKIQGSDAGWTLGYMLNLTNMIPAEQPLSTPLSHSTYVFLMVLFSLVLFTVAIIGLLIFHKPSYFWKDMV

SEQ ID NO: 2 - protein, 574 aa, Homo sapiens [sequence omitted]

SEQ ID NO: 3 - protein, 290 aa, Homo sapiens
MRIFAVFIFMTYWHLLNAFTVTVPKDLYVVEYGSNMTIECKFPVEKQLDLAALIVYWEMEDKNIIQFVHGEEDLKVQHSSYRQRARLLKDQLSLGNAALQITDVKLQDAGVYRCMISYGGADYKRITVKVNAPYNKINQRILVVDPVTSEHELTCQAEGYPKAEVIWTSSDHQVLSGKTTTTNSKREEKLFNVTSTLRINTTTNEIFYCTFRRLDPEENHTAELVIPELPLAHPPNERTHLVILGAILLCLGVALTFIFRLRKGRMMDVKKCGIQDTNSKKQSDTHLEET

SEQ ID NO: 4 - protein, 313 aa, Homo sapiens
MVVMAPRTLFLLLSGALTLTETWAGSHSMRYFSAAVSRPGRGEPRFIAMGYVDDTQFVRFDSDSACPRMEPRAPWVEQEGPEYWEEETRNTKAHAQTDRMNLQTLRGYYNQSEASSHTLQWMIGCDLGSDGRLLRGYEQYAYDGKDYLALNEDLRSWTAADTAAQISKRKCEAANVAEQRRAYLEGTCVEWLHRYLENGKEMLQRADPPKTHVTHHPVFDYEATLRCWALGFYPAEIILTWQRDGEDQTQDVELVETRPAGDGTFQKWAAVVVPSGEEQRYTCHVQHEGLPEPLMLRWKQSSLPTIPIMGIVA

SEQ ID NO: 5 - protein, 338 aa, Homo sapiens
MVVMAPRTLFLLLSGALTLTETWAGSHSMRYFSAAVSRPGRGEPRFIAMGYVDDTQFVRFDSDSACPRMEPRAPWVEQEGPEYWEEETRNTKAHAQTDRMNLQTLRGYYNQSEASSHTLQWMIGCDLGSDGRLLRGYEQYAYDGKDYLALNEDLRSWTAADTAAQISKRKCEAANVAEQRRAYLEGTCVEWLHRYLENGKEMLQRADPPKTHVTHHPVFDYEATLRCWALGFYPAEIILTWQRDGEDQTQDVELVETRPAGDGTFQKWAAVVVPSGEEQRYTCHVQHEGLPEPLMLRWKQSSLPTIPIMGIVAGLVVLAAVVTGAAVAAVLWRKKSSD

SEQ ID NO: 6 - protein, 133 aa, Homo sapiens [sequence omitted]

SEQ ID NO: 7 - protein, 369 aa, Artificial Sequence
  Synthetic sequence
APTSSSTKKTQLQLEHLLLDLQMILNGINNYKNPKLTRMLTFKFYMPKKATELKHLQCLEEELKPLEEVLNLAQSKNFHLRPRDLISRINVIVLELKGSETTFMCEYADETATIVEFLNRWITFSQSIISTLTGGGGAGGGGDKTHTCPPCPAPELLGGPSVFLFPPKPKDTLMISRTPEVTCVVVDVSHEDPEVKFNWYVDGVEVHNAKTKPREEQYASTYRVVSVLTVLHQDWLNGKEYKCKVSNKALPAPIEKTISKAKGQPREPQVYTLPPSRDELTKNQVSLTCLVKGFYPSDIAVEWESNGQPENNYKTTPPVLDSDGSFFLYSKLTVDKSRWQQGNVFSCSVMHEALHNHYTQKSLSLSPGK

SEQ ID NO: 8 - protein, 356 aa, Artificial Sequence
  Synthetic sequence
APTSSSTKKTQLQLEHLLLHLQMILNGINNYKNPKLTRMLTFKFYMPKKATELKHLQCLEEELKPLEEVLNLAQSKNFHLRPRDLISNINVIVLELKGSETTFMCEYADETATIVEFLNRWITFSQSIISTLTVECPPCPAPPVAGPSVFLFPPKPKDTLMISRTPEVTCVVVDVSHEDPEVQFNWYVDGVEVHNAKTKPREEQFNSTFRVVSVLTVVHQDWLNGKEYKCKVSNKGLPAPIEKTISKTKGQPREPQVYTLPPSREEMTKNQVSLTCLVKGFYPSDIAVEWESNGQPENNYKTTPPMLDSDGSFFLYSKLTVDKSRWQQGNVFSCSVMHEALHNHYTQKSLSLSPGK

SEQ ID NO: 9 - protein, 359 aa, Artificial Sequence
  Synthetic sequence
APTSSSTKKTQLQLEHLLLDLQMILNGINNYKNPKLTRMLTFKFYMPKKATELKHLQCLEEELKPLEEVLNLAQSKNFHLRPRDLISRINVIVLELKGSETTFMCEYADETATIVEFLNRWITFSQSIISTLTDKTHTCPPCPAPELLGGPSVFLFPPKPKDTLMISRTPEVTCVVVDVSHEDPEVKFNWYVDGVEVHNAKTKPREEQYASTYRVVSVLTVLHQDWLNGKEYKCKVSNKALPAPIEKTISKAKGQPREPQVYTLPPSRDELTKNQVSLTCLVKGFYPSDIAVEWESNGQPENNYKTTPPVLDSDGSFFLYSKLTVDKSRWQQGNVFSCSVMHEALHNHYTQKSLSLSPG

SEQ ID NO: 10 - protein, 364 aa, Artificial Sequence
  Synthetic sequence
APTSSSTKKTQLQLEHLLLDLQMILNGINNYKNPKLTRMLTFKFYMPKKATELKHLQCLEEELKPLEEVLNLAQSKNFHLRPRDLISRINVIVLELKGSETTFMCEYADETATIVEFLNRWITFSQSIISTLTGGGGSDKTHTCPPCPAPELLGGPSVFLFPPKPKDTLMISRTPEVTCVVVDVSHEDPEVKFNWYVDGVEVHNAKTKPREEQYASTYRVVSVLTVLHQDWLNGKEYKCKVSNKALPAPIEKTISKAKGQPREPQVYTLPPSRDELTKNQVSLTCLVKGFYPSDIAVEWESNGQPENNYKTTPPVLDSDGSFFLYSKLTVDKSRWQQGNVFSCSVMHEALHNHYTQKSLSLSPG

SEQ ID NO: 11 - protein, 369 aa, Artificial Sequence
  Synthetic sequence
APTSSSTKKTQLQLEHLLLDLQMILNGINNYKNPKLTRMLTFKFYMPKKATELKHLQCLEEELKPLEEVLNLAQSKNFHLRPRDLISRINVIVLELKGSETTFMCEYADETATIVEFLNRWITFSQSIISTLTGGGGSGGGGSDKTHTCPPCPAPELLGGPSVFLFPPKPKDTLMISRTPEVTCVVVDVSHEDPEVKFNWYVDGVEVHNAKTKPREEQYASTYRVVSVLTVLHQDWLNGKEYKCKVSNKALPAPIEKTISKAKGQPREPQVYTLPPSRDELTKNQVSLTCLVKGFYPSDIAVEWESNGQPENNYKTTPPVLDSDGSFFLYSKLTVDKSRWQQGNVFSCSVMHEALHNHYTQKSLSLSPG

SEQ ID NO: 12 - protein, 374 aa, Artificial Sequence
  Synthetic sequence
APTSSSTKKTQLQLEHLLLDLQMILNGINNYKNPKLTRMLTFKFYMPKKATELKHLQCLEEELKPLEEVLNLAQSKNFHLRPRDLISRINVIVLELKGSETTFMCEYADETATIVEFLNRWITFSQSIISTLTGGGGSGGGGSGGGGSDKTHTCPPCPAPELLGGPSVFLFPPKPKDTLMISRTPEVTCVVVDVSHEDPEVKFNWYVDGVEVHNAKTKPREEQYASTYRVVSVLTVLHQDWLNGKEYKCKVSNKALPAPIEKTISKAKGQPREPQVYTLPPSRDELTKNQVSLTCLVKGFYPSDIAVEWESNGQPENNYKTTPPVLDSDGSFFLYSKLTVDKSRWQQGNVFSCSVMHEALHNYHTQKSLSLSPG

SEQ ID NO: 13 - protein, 379 aa, Artificial Sequence
  Synthetic sequence
APTSSSTKKTQLQLEHLLLDLQMILNGINNYKNPKLTRMLTFKFYMPKKATELKHLQCLEEELKPLEEVLNLAQSKNFHLRPRDLISRINVIVLELKGSETTFMCEYADETATIVEFLNRWITFSQSIISTLTGGGGSGGGGSGGGGSGGGGSDKTHTCPPCPAPELLGGPSVFLFPPKPKDTLMISRTPEVTCVVVDVSHEDPEVKFNWYVDGVEVHNAKTKPREEQYASTYRVVSVLTVLHQDWLNGKEYKCKVSNKALPAPIEKTISKAKGQPREPQVYTLPPSRDELTKNQVSLTCLVKGFYPSDIAVEWESNGQPENNYKTTPPVLDSDGSFFLYSKLTVDKSRWQQGNVFSCSVMHEALHNHYTQKSLSLSPG

SEQ ID NO: 14 - protein, 374 aa, Artificial Sequence
  Synthetic sequence
APTSSSTKKTQLQLEHLLLHLQMILNGINNYKNPKLTRMLTFKFYMPKKATELKHLQCLEEELKPLEEVLNLAQSKNFHLRPRDLISNINVIVLELKGSETTFMCEYADETATIVEFLNRWITFSQSIISTLTGGGGSGGGGSGGGGSDKTHTCPPCPAPELLGGPSVFLFPPKPKDTLMISRTPEVTCVVVDVSHEDPEVKFNWYVDGVEVHNAKTKPREEQYASTYPVVSVLTVLHQDWLNGKEYKCKVSNKALPAPIEKTISKAKGQPREPQVYTLPPSRDELTKNQVSLTCLVKGFYPSDIAVEWESNGQPENNYKTTPPVLDSDGSFFLYSKLTVDKSRWQQGNVFSCSVMHEALHNHYTQKSLSLSPG

SEQ ID NO: 15 - protein, 153 aa, Homo sapiens
MYRMQLLSCIALSLALVTNSAPTSSSTKKTQLQLEHLLLDLQMILNGINNYKNPKLTRMLTFKFYMPKKATELKHLQCLEEELKPLEEVLNLAQSKNFHLRPRDLISNINVIVLELKGSETTFMCEYADETATIVEFLNRWITFCQSIISTLT

SEQ ID NO: 16 - protein, 153 aa, Artificial Sequence
  Synthetic sequence
MYRMQLLSCIALSLALVTNSAPTSSSTKKTQLQLEHLLLDLQMILNGISNHKNPRLARMLTFKFYMPEKATEIKHLQCLEEELKPLEEALRLAPSKNFHLRPRDLISDINVIVLELKGSETTFMCEYADETATIVEFLNRWITFSQSIISTLT

SEQ ID NO: 17 - protein, 153 aa, Artificial Sequence
  Synthetic sequence
MYRMQLLSCIALSLALVTNSAPTSSSTKKTQLQLEHLLLDLQMILNGISNHKNPRLARMLTFKFYMPEKATELKHIQCLEEELKPLEEALRLAPSKNFHLRPRDLISDINVIVLELKGSETTFMCEYADETATIVEFLNRWITFSQSIISTLT

SEQ ID NO: 18 - protein, 153 aa, Artificial Sequence
  Synthetic sequence
MYRMQLLSCIALSLALVTNSAPTSSSTKKTQLQLEHLLLDLQMILNGISNHKNPRLARMLTFKFYMPEKATELKHLQCLEEELKPLEEALRLAPSKNFHIRPRDLISDINVIVLELKGSETTFMCEYADETATIVEFLNRWITFSQSIISTLT

SEQ ID NO: 19 - protein, 153 aa, Artificial Sequence
  Synthetic sequence
MYRMQLLSCIALSLALVTNSAPTSSSTKKTQLQLEHLLLDLQMILNGISNHKNPRLARMLTFKFYMPEKATELKHLQCLEEELKPLEEALRLAPSKNFHLRPRDLISDINVIVLELKGSETTFMCEYADETATIVEFINRWITFSQSIISTLT

SEQ ID NO: 20 - protein, 20 aa, Artificial Sequence
  Synthetic sequence
MYRMQLLSCIALSLALVTNS

SEQ ID NO: 21 - protein, 226 aa, Artificial Sequence
  Synthetic sequence
DKTHTCPPCPAPEAAGAPSVFLFPPKPKDTLMISRTPEVTCVVVDVSHEDPEVKFNWYVDGVEVHNAKTKPREEQYNSTYRVVSVLTVLHQDWLNGKEYKCKVSNKALPAPIEKTISKAKGQPREPQVYTLPPSREEMTKNQVSLTCLVKGFYPSDIAVEWESNGQPENNYKTTPPVLDSDGSFFLYSKLTVDKSRWQQGNVFSCSVMHEALHNHYTQKSLSLSPG

SEQ ID NO: 22 - protein, 20 aa, Artificial Sequence
  Synthetic sequence
GGGGSGGGGSGGGGSGGGGS

SEQ ID NO: 23 - protein, 5 aa, Artificial Sequence
  Synthetic sequence
GGGGS

SEQ ID NO: 24 - protein, 399 aa, Artificial Sequence
  Synthetic sequence
MYRMQLLSCIALSLALVTNSAPTSSSTKKTQLQLEHLLLDLQMILNGISNHKNPRLARMLTFKFYMPEKATEIKHLQCLEEELKPLEEALRLAPSKNFHLRPRDLISDINVIVLELKGSETTFMCEYADETATIVEFLNRWITFSQSIISTLTGGGGSGGGGSGGGGSGGGGSDKTHTCPPCPAPEAAGAPSVFLFPPKPKDTLMISRTPEVTCVVVDVSHEDPEVKFNWYVDGVEVHNAKTKPREEQYNSTYRVVSVLTVLHQDWLNGKEYKCKVSNKALPAPIEKTISKAKGQPREPQVYTLPPSREEMTKNQVSLTCLVKGFYPSDIAVEWESNGQPENNYKTTPPVLDSDGSFFLYSKLTVDKSRWQQGNVFSCSVMHEALHNHYTQKSLSLSPG

SEQ ID NO: 25 - protein, 399 aa, Artificial Sequence
  Synthetic sequence
MYRMQLLSCIALSLALVTNSAPTSSSTKKTQLQLEHLLLDLQMILNGISNHKNPRLARMLTFKFYMPEKATELKHIQCLEEELKPLEEALRLAPSKNFHLRPRDLISDINVIVLELKGSETTFMCEYADETATIVEFLNRWITFSQSIISTLTGGGGSGGGGSGGGGSGGGGSDKTHTCPPCPAPEAAGAPSVFLFPPKPKDTLMISRTPEVTCVVVDVSHEDPEVKFNWYVDGVEVHNAKTKPREEQYNSTYRVVSVLTVLHQDWLNGKEYKCKVSNKALPAPIEKTISKAKGQPREPQVYTLPPSREEMTKNQVSLTCLVKGFYPSDIAVEWESNGQPENNYKTTPPVLDSDGSFFLYSKLTVDKSRWQQGNVFSCSVMHEALHNHYTQKSLSLSPG

SEQ ID NO: 26 - protein, 399 aa, Artificial Sequence
  Synthetic sequence
MYRMQLLSCIALSLALVTNSAPTSSSTKKTQLQLEHLLLDLQMILNGISNHKNPRLARMLTFKFYMPEKATELKHLQCLEEELKPLEEALRLAPSKNFHIRPRDLISDINVIVLELKGSETTFMCEYADETATIVEFLNRWITFSQSIISTLTGGGGSGGGGSGGGGSGGGGSDKTHTCPPCPAPEAAGAPSVFLFPPKPKDTLMISRTPEVTCVVVDVSHEDPEVKFNWYVDGVEVHNAKTKPREEQYNSTYRVVSVLTVLHQDWLNGKEYKCKVSNKALPAPIEKTISKAKGQPREPQVYTLPPSREEMTKNQVSLTCLVKGFYPSDIAVEWESNGQPENNYKTTPPVLDSDGSFFLYSKLTVDKSRWQQGNVFSCSVMHEALHNHYTQKSLSLSPG

SEQ ID NO: 27 - protein, 399 aa, Artificial Sequence
  Synthetic sequence
MYRMQLLSCIALSLALVTNSAPTSSSTKKTQLQLEHLLLDLQMILNGISNHKNPRLARMLTFKFYMPEKATELKHLQCLEEELKPLEEALRLAPSKNFHLRPRDLISDINVIVLELKGSETTFMCEYADETATIVEFINRWITFSQSIISTLTGGGGSGGGGSGGGGSGGGGSDKTHTCPPCPAPEAAGAPSVFLFPPKPKDTLMISRTPEVTCVVVDVSHEDPEVKFNWYVDGVEVHNAKTKPREEQYNSTYRVVSVLTVLHQDWLNGKEYKCKVSNKALPAPIEKTISKAKGQPREPQVYTLPPSREEMTKNQVSLTCLVKGFYPSDIAVEWESNGQPENNYKTTPPVLDSDGSFFLYSKLTVDKSRWQQGNVFSCSVMHEALHNHYTQKSLSLSPG

SEQ ID NO: 28 - protein, 226 aa, Artificial Sequence
  Synthetic sequence
DKTHTCPPCPAPELLGGPSVFLFPPKPKDTLMISRTPEVTCVVVDVSHEDPEVKFNWYVDGVEVHNAKTKPREEQYNSTYRVVSVLTVLHQDWLNGKEYKCKVSNKALPAPIEKTISKAKGQPREPQVYTLPPSREEMTKNQVSLTCLVKGFYPSDIAVEWESNGQPENNYKTTPPVLDSDGSFFLYSKLTVDKSRWQQGNVFSCSVMHEALHNHYTQKSLSLSPG

SEQ ID NO: 29 - protein, 5 aa, Artificial Sequence
  Synthetic sequence
GGGGA

SEQ ID NO: 30 - protein, 15 aa, Artificial Sequence
  Synthetic sequence
GGGGSGGGGSGGGGS

SEQ ID NO: 31 - protein, 133 aa, Artificial Sequence
  Synthetic sequence
APTSSSTKKTQLQLEHLLLDLQMILNGINNYKNPKLTRMLTFKFYMPKKATELKHLQCLEEELKPLEEVLNLAQSKNFHLRPRDLISNINVIVLELKGSETTFMCEYADETATIVEFLNRWITFSQSIISTLT

SEQ ID NO: 32 - protein, 133 aa, Artificial Sequence
  Synthetic sequence
APASSSTKKTQLQLEHLLLDLQMILNGINNYKNPKLTRMLTFKFYMPKKATELKHLQCLEEELKPLEEVLNLAQSKNFHLRPRDLISNINVIVLELKGSETTFMCEYADETATIVEFLNRWITFSQSIISTLT

SEQ ID NO: 33 - protein, 133 aa, Artificial Sequence
  Synthetic sequence
APTSSSTKKTQLQLEHLLLDLQMILNGINNYKNPKLTRMLTFKFYMPKKATELKHLQCLEEELKPLEEVLNLAQSKNFHLRPRDLISRINVIVLELKGSETTFMCEYADETATIVEFLNRWITFSQSIISTLT

SEQ ID NO: 34 - protein, 133 aa, Artificial Sequence [sequence omitted]

SEQ ID NO: 35 - protein, 133 aa, Artificial Sequence
  Synthetic sequence
APTSSSTKKTQLQLEHLLLDLQMILNGINNYKNPKLTRMLTFKFYMPKKATELKHLQCLEEELKPLEEALNLAPSKNFHLRPRDLISDINVIVLELKGSETTFMCEYADETATIVEFLNRWITFSQSIISTLT

SEQ ID NO: 36 - protein, 133 aa, Artificial Sequence
  Synthetic sequence
APTSSSTKKTQLQLEHLLLDLQMILNGINNYKNPKLTRMLTFKFYMPKKATELKHLQCLEEELKPLEEALNLAPSKNFHLRPRDLISRINVIVLELKGSETTFMCEYADETATIVEFLNRWITFSQSIISTLT

SEQ ID NO: 37 - protein, 133 aa, Artificial Sequence
  Synthetic sequence
APTSSSTKKTQLQLEHLLLDLQMILNGINNYKNPKLTRMLTFKFYMPKKATELKHLQCLEEELKPLEEVLNLAQSKNFHLRPRDLISDINVIVLELKGSETTFMCEYADETATIVEFLNRWITFSQSIISTLT

SEQ ID NO: 38 - protein, 133 aa, Artificial Sequence
  Synthetic sequence
APTSSSTKKTQLQLEHLLLDLQMILNGINNYKNPKLTRMLTFKFYMPKKATEIKHLQCLEEELKPLEEALNLAPSKNFHLRPRDLISDINVIVLELKGSETTFMCEYADETATIVEFLNRWITFSQSIISTLT

SEQ ID NO: 39 - protein, 133 aa, Artificial Sequence
  Synthetic sequence
APTSSSTKKTQLQLEHLLLDLQMILNGINNYKNPKLTRMLTFKFYMPKKATELKHIQCLEEELKPLEEALNLAPSKNFHLRPRDLISDINVIVLELKGSETTFMCEYADETATIVEFLNRWITFSQSIISTLT

SEQ ID NO: 40 - protein, 133 aa, Artificial Sequence
  Synthetic sequence
APTSSSTKKTQLQLEHLLLDLQMILNGINNYKNPKLTRMLTFKFYMPKKATELKHLQCLEEELKPLEEALNLAPSKNFHIRPRDLISDINVIVLELKGSETTFMCEYADETATIVEFLNRWITFSQSIISTLT

SEQ ID NO: 41 - protein, 133 aa, Artificial Sequence
  Synthetic sequence
APTSSSTKKTQLQLEHLLLDLQMILNGINNYKNPKLTRMLTFKFYMPKKATELKHLQCLEEELKPLEEALNLAPSKNFHLRPRDLISDINVIVLELKGSETTFMCEYADETATIVEFINRWITFSQSIISTLT

SEQ ID NO: 42 - protein, 585 aa, Homo sapiens [sequence omitted]

SEQ ID NO: 43 - protein, 226 aa, Artificial Sequence
  Synthetic sequence
DKTHTCPPCPAPELLGGPSVFLFPPKPKDTLMISRTPEVTCVVVDVSHEDPEVKFNWYVDGVEVHNAKTKPREEQYGSTYRVVSVLTVLHQDWLNGKEYKCKVSNKALPAPIEKTISKAKGQPREPQVYTLPPSREEMTKNQVSLTCLVKGFYPSDIAVEWESNGQPENNYKTTPPVLDSDGSFFLYSKLTVDKSRWQQGNVFSCSVMHEALHNHYTQKSLSLSPG

SEQ ID NO: 44 - protein, 329 aa, Artificial Sequence
  Synthetic sequence
ASTKGPSVFPLAPSSKSTSGGTAALGCLVKDYFPEPVTVSWNSGALTSGVHTFPAVLQSSGLYSLSSVVTVPSSSLGTQTYICNVNHKPSNTKVDKKVEPKSCDKTHTCPPCPAPEAAGAPSVFLFPPKPKDTLMISRTPEVTCVVVDVSHEDPEVKFNWYVDGVEVHNAKTKPREEQYNSTYRVVSVLTVLHQDWLNGKEYKCKVSNKALPAPIEKTISKAKGQPREPQVYTLPPSREEMTKNQVSLTCLVKGFYPSDIAVEWESNGQPENNYKTTPPVLDSDGSFFLYSKLTVDKSRWQQGNVFSCSVMHEALHNHYTQKSLSLSPG

SEQ ID NO: 45 - protein, 107 aa, Artificial Sequence [sequence omitted]

SEQ ID NO: 46 - protein, 374 aa, Artificial Sequence
  Synthetic sequence
APTSSSTKKTQLQLEHLLLDLQMILNGINNYKNPKLTRMLTFKFYMPKKATELKHLQCLEEELKPLEEVLNLAQSKNFHLRPRDLISNINVIVLELKGSETTFMCEYADETATIVEFLNRWITFSQSIISTLTGGGGSGGGGSGGGGSDKTHTCPPCPAPEAAGAPSVFLFPPKPKDTLMISRTPEVTCVVVDVSHEDPEVKFNWYVDGVEVHNAKTKPREEQYNSTYRVVSVLTVLHQDWLNGKEYKCKVSNKALPAPIEKTISKAKGQPREPQVYTLPPSREEMTKNQVSLTCLVKGFYPSDIAVEWESNGQPENNYKTTPPVLDSDGSFFLYSKLTVDKSRWQQGNVFSCSVMHEALHNHYTQKSLSLSPG

SEQ ID NO: 47 - protein, 374 aa, Artificial Sequence
  Synthetic sequence
APASSSTKKTQLQLEHLLLDLQMILNGINNYKNPKLTRMLTFKFYMPKKATELKHLQCLEEELKPLEEVLNLAQSKNFHLRPRDLISNINVIVLELKGSETTFMCEYADETATIVEFLNRWITFSQSIISTLTGGGGSGGGGSGGGGSDKTHTCPPCPAPEAAGAPSVFLFPPKPKDTLMISRTPEVTCVVVDVSHEDPEVKFNWYVDGVEVHNAKTKPREEQYNSTYRVVSVLTVLHQDWLNGKEYKCKVSNKALPAPIEKTISKAKGQPREPQVYTLPPSREEMTKNQVSLTCLVKGFYPSDIAVEWESNGQPENNYKTTPPVLDSDGSFFLYSKLTVDKSRWQQGNVFSCSVMHEALHNHYTQKSLSLSPG

SEQ ID NO: 48 - protein, 374 aa, Artificial Sequence
  Synthetic sequence
APTSSSTKKTQLQLEHLLLDLQMILNGINNYKNPKLTRMLTFKFYMPKKATELKHLQCLEEELKPLEEVLNLAQSKNFHLRPRDLISRINVIVLELKGSETTFMCEYADETATIVEFLNRWITFSQSIISTLTGGGGSGGGGSGGGGSDKTHTCPPCPAPEAAGAPSVFLFPPKPKDTLMISRTPEVTCVVVDVSHEDPEVKFNWYVDGVEVHNAKTKPREEQYNSTYRVVSVLTVLHQDWLNGKEYKCKVSNKALPAPIEKTISKAKGQPREPQVYTLPPSREEMTKNQVSLTCLVKGFYPSDIAVEWESNGQPENNYKTTPPVLDSDGSFFLYSKLTVDKSRWQQGNVFSCSVMHEALHNHYTQKSLSLSPG

SEQ ID NO: 49 - protein, 374 aa, Artificial Sequence
  Synthetic sequence
APTSSSTKKTQLQLEHLLLDLQMILNGINNYKNPKLTRMLTFKFYMPKKATELKHLQCLEEELKPLEEALNLAPSKNFHLRPRDLISNINVIVLELKGSETTFMCEYADETATIVEFLNRWITFSQSIISTLTGGGGSGGGGSGGGGSDKTHTCPPCPAPEAAGAPSVFLFPPKPKDTLMISRTPEVTCVVVDVSHEDPEVKFNWYVDGVEVHNAKTKPREEQYNSTYRVVSVLTVLHQDWLNGKEYKCKVSNKALPAPIEKTISKAKGQPREPQVYTLPPSREEMTKNQVSLTCLVKGFYPSDIAVEWESNGQPENNYKTTPPVLDSDGSFFLYSKLTVDKSRWQQGNVFSCSVMHEALHNHYTQKSLSLSPG

SEQ ID NO: 50 - protein, 374 aa, Artificial Sequence
  Synthetic sequence
APTSSSTKKTQLQLEHLLLDLQMILNGINNYKNPKLTRMLTFKFYMPKKATELKHLQCLEEELKPLEEALNLAPSKNFHLRPRDLISDINVIVLELKGSETTFMCEYADETATIVEFLNRWITFSQSIISTLTGGGGSGGGGSGGGGSDKTHTCPPCPAPEAAGAPSVFLFPPKPKDTLMISRTPEVTCVVVDVSHEDPEVKFNWYVDGVEVHNAKTKPREEQYNSTYRVVSVLTVLHQDWLNGKEYKCKVSNKALPAPIEKTISKAKGQPREPQVYTLPPSREEMTKNQVSLTCLVKGFYPSDIAVEWESNGQPENNYKTTPPVLDSDGSFFLYSKLTVDKSRWQQGNVFSCSVMHEALHNHYTQKSLSLSPG

SEQ ID NO: 51 - protein, 374 aa, Artificial Sequence
  Synthetic sequence
APTSSSTKKTQLQLEHLLLDLQMILNGINNYKNPKLTRMLTFKFYMPKKATELKHLQCLEEELKPLEEALNLAPSKNFHLRPRDLISRINVIVLELKGSETTFMCEYADETATIVEFLNRWITFSQSIISTLTGGGGSGGGGSGGGGSDKTHTCPPCPAPEAAGAPSVFLFPPKPKDTLMISRTPEVTCVVVDVSHEDPEVKFNWYVDGVEVHNAKTKPREEQYNSTYRVVSVLTVLHQDWLNGKEYKCKVSNKALPAPIEKTISKAKGQPREPQVYTLPPSREEMTKNQVSLTCLVKGFYPSDIAVEWESNGQPENNYKTTPPVLDSDGSFFLYSKLTVDKSRWQQGNVFSCSVMHEALHNHYTQKSLSLSPG

SEQ ID NO: 52 - protein, 374 aa, Artificial Sequence
  Synthetic sequence
APTSSSTKKTQLQLEHLLLDLQMILNGINNYKNPKLTRMLTFKFYMPKKATELKHLQCLEEELKPLEEVLNLAQSKNFHLRPRDLISDINVIVLELKGSETTFMCEYADETATIVEFLNRWITFSQSIISTLTGGGGSGGGGSGGGGSDKTHTCPPCPAPEAAGAPSVFLFPPKPKDTLMISRTPEVTCVVVDVSHEDPEVKFNWYVDGVEVHNAKTKPREEQYNSTYRVVSVLTVLHQDWLNGKEYKCKVSNKALPAPIEKTISKAKGQPREPQVYTLPPSREEMTKNQVSLTCLVKGFYPSDIAVEWESNGQPENNYKTTPPVLDSDGSFFLYSKLTVDKSRWQQGNVFSCSVMHEALHNHYTQKSLSLSPG

SEQ ID NO: 53 - protein, 379 aa, Artificial Sequence
  Synthetic sequence
APTSSSTKKTQLQLEHLLLDLQMILNGINNYKNPKLTRMLTFKFYMPKKATEIKHLQCLEEELKPLEEALNLAPSKNFHLRPRDLISDINVIVLELKGSETTFMCEYADETATIVEFLNRWITFSQSIISTLTGGGGSGGGGSGGGGSGGGGSDKTHTCPPCPAPEAAGAPSVFLFPPKPKDTLMISRTPEVTCVVVDVSHEDPEVKFNWYVDGVEVHNAKTKPREEQYNSTYRVVSVLTVLHQDWLNGKEYKCKVSNKALPAPIEKTISKAKGQPREPQVYTLPPSREEMTKNQVSLTCLVKGFYPSDIAVEWESNGQPENNYKTTPPVLDSDGSFFLYSKLTVDKSRWQQGNVFSCSVMHEALHNHYTQKSLSLSPG

SEQ ID NO: 54 - protein, 379 aa, Artificial Sequence
  Synthetic sequence
APTSSSTKKTQLQLEHLLLDLQMILNGINNYKNPKLTRMLTFKFYMPKKATELKHIQCLEEELKPLEEALNLAPSKNFHLRPRDLISDINVIVLELKGSETTFMCEYADETATIVEFLNRWITFSQSIISTLTGGGGSGGGGSGGGGSGGGGSDKTHTCPPCPAPEAAGAPSVFLFPPKPKDTLMISRTPEVTCVVVDVSHEDPEVKFNWYVDGVEVHNAKTKPREEQYNSTYRVVSVLTVLHQDWLNGKEYKCKVSNKALPAPIEKTISKAKGQPREPQVYTLPPSREEMTKNQVSLTCLVKGFYPSDIAVEWESNGQPENNYKTTPPVLDSDGSFFLYSKLTVDKSRWQQGNVFSCSVMHEALHNHYTQKSLSLSPG

SEQ ID NO: 55 - protein, 379 aa, Artificial Sequence
  Synthetic sequence
APTSSSTKKTQLQLEHLLLDLQMILNGINNYKNPKLTRMLTFKFYMPKKATELKHLQCLEEELKPLEEALNLAPSKNFHIRPRDLISDINVIVLELKGSETTFMCEYADETATIVEFLNRWITFSQSIISTLTGGGGSGGGGSGGGGSGGGGSDKTHTCPPCPAPEAAGAPSVFLFPPKPKDTLMISRTPEVTCVVVDVSHEDPEVKFNWYVDGVEVHNAKTKPREEQYNSTYRVVSVLTVLHQDWLNGKEYKCKVSNKALPAPIEKTISKAKGQPREPQVYTLPPSREEMTKNQVSLTCLVKGFYPSDIAVEWESNGQPENNYKTTPPVLDSDGSFFLYSKLTVDKSRWQQGNVFSCSVMHEALHNHYTQKSLSLSPG

SEQ ID NO: 56 - protein, 379 aa, Artificial Sequence
  Synthetic sequence
APTSSSTKKTQLQLEHLLLDLQMILNGINNYKNPKLTRMLTFKFYMPKKATELKHLQCLEEELKPLEEALNLAPSKNFHLRPRDLISDINVIVLELKGSETTFMCEYADETATIVEFINRWITFSQSIISTLTGGGGSGGGGSGGGGSGGGGSDKTHTCPPCPAPEAAGAPSVFLFPPKPKDTLMISRTPEVTCVVVDVSHEDPEVKFNWYVDGVEVHNAKTKPREEQYNSTYRVVSVLTVLHQDWLNGKEYKCKVSNKALPAPIEKTISKAKGQPREPQVYTLPPSREEMTKNQVSLTCLVKGFYPSDIAVEWESNGQPENNYKTTPPVLDSDGSFFLYSKLTVDKSRWQQGNVFSCSVMHEALHNHYTQKSLSLSPG

SEQ ID NO: 57 - protein, 379 aa, Artificial Sequence
  Synthetic sequence
APTSSSTKKTQLQLEHLLLDLQMILNGINNYKNPKLTRMLTFKFYMPKKATELKHLQCLEEELKPLEEALNLAPSKNFHLRPRDLISDINVIVLELKGSETTFMCEYADETATIVEFLNRWITFSQSIISTLTGGGGSGGGGSGGGGSGGGGSDKTHTCPPCPAPEAAGAPSVFLFPPKPKDTLMISRTPEVTCVVVDVSHEDPEVKFNWYVDGVEVHNAKTKPREEQYNSTYRVVSVLTVLHQDWLNGKEYKCKVSNKALPAPIEKTISKAKGQPREPQVYTLPPSREEMTKNQVSLTCLVKGFYPSDIAVEWESNGQPENNYKTTPPVLDSDGSFFLYSKLTVDKSRWQQGNVFSCSVMHEALHNHYTQKSLSLSPG

SEQ ID NO: 58 - protein, 364 aa, Artificial Sequence
  Synthetic sequence
DKTHTCPPCPAPELLGGPSVFLFPPKPKDTLMISRTPEVTCVVVDVSHEDPEVKFNWYVDGVEVHNAKTKPREEQYGSTYRVVSVLTVLHQDWLNGKEYKCKVSNKALPAPIEKTISKAKGQPREPQVYTLPPSREEMTKNQVSLTCLVKGFYPSDIAVEWESNGQPENNYKTTPPVLDSDGSFFLYSKLTVDKSRWQQGNVFSCSVMHEALHNHYTQKSLSLSPGGGGGSAPTSSSTKKTQLQLEHLLLDLQMILNGINNYKNPKLTRMLTFKFYMPKKATELKHLQCLEEELKPLEEALNLAPSKNFHLRPRDLISDINVIVLELKGSETTFMCEYADETATIVEFLNRWITFAQSIISTLT

SEQ ID NO: 59 - protein, 379 aa, Artificial Sequence
  Synthetic sequence
  misc_feature (53)..(53): Xaa can be any naturally occurring amino acid
  misc_feature (56)..(56): Xaa can be any naturally occurring amino acid
  misc_feature (80)..(80): Xaa can be any naturally occurring amino acid
  misc_feature (118)..(118): Xaa can be any naturally occurring amino acid
APTSSSTKKTQLQLEHLLLDLQMILNGINNYKNPKLTRMLTFKFYMPKKATEXKHXQCLEEELKPLEEALNLAPSKNFHXRPRDLISDINVIVLELKGSETTFMCEYADETATIVEFXNRWITFSQSIISTLTGGGGSGGGGSGGGGSGGGGSDKTHTCPPCPAPEAAGAPSVFLFPPKPKDTLMISRTPEVTCVVVDVSHEDPEVKFNWYVDGVEVHNAKTKPREEQYNSTYRVVSVLTVLHQDWLNGKEYKCKVSNKALPAPIEKTISKAKGQPREPQVYTLPPSREEMTKNQVSLTCLVKGFYPSDIAVEWESNGQPENNYKTTPPVLDSDGSFFLYSKLTVDKSRWQQGNVFSCSVMHEALHNHYTQKSLSLSPG

SEQ ID NO: 60 - protein, 133 aa, Artificial Sequence
  Synthetic sequence
  misc_feature (53)..(53): Xaa can be any naturally occurring amino acid
  misc_feature (56)..(56): Xaa can be any naturally occurring amino acid
  misc_feature (80)..(80): Xaa can be any naturally occurring amino acid
  misc_feature (118)..(118): Xaa can be any naturally occurring amino acid
APTSSSTKKTQLQLEHLLLDLQMILNGINNYKNPKLTRMLTFKFYMPKKATEXKHXQCLEEELKPLEEALNLAPSKNFHXRPRDLISDINVIVLELKGSETTFMCEYADETATIVEFXNRWITFSQSIISTLT

SEQ ID NO: 61 - protein, 9 aa, Artificial Sequence
  Synthetic sequence
FTFSSYGMH

SEQ ID NO: 62 - protein, 13 aa, Artificial Sequence
  Synthetic sequence
AVISDDGSDKYYA

SEQ ID NO: 63 - protein, 15 aa, Artificial Sequence
  Synthetic sequence
CTTSKYYYYYGMDVW

SEQ ID NO: 64 - protein, 11 aa, Artificial Sequence
  Synthetic sequence
QASQDISKSLN

SEQ ID NO: 65 - protein, 7 aa, Artificial Sequence
  Synthetic sequence
AASSLQS

SEQ ID NO: 66 - protein, 11 aa, Artificial Sequence [sequence omitted]

SEQ ID NO: 67 - protein, 247 aa, Artificial Sequence
  Synthetic sequence
EVQLLESGGGLVQPGGSLRLSCAASGFTFSSYGMHWVRQAPGKGLEWVAVISDDGSDKYYADSVKGRFTISRDNSKNTLYLQMNSLRAEDTAVYYCTTSKYYYYYGMDVWGQGTTVTVSSGGGGSGGGGSGGGGSGGGGSDIQMTQSPSSLSASVGDRVTITCQASQDISKSLNWYQQKPGKAPKLLIYAASSLQSGVPSRFSGSGSGTDFTLTISSLQPEDFATYYCQQGYSTPLTFGGGTKVEIK

SEQ ID NO: 68 - protein, 9 aa, Artificial Sequence
  Synthetic sequence
YPFIGYYLH

SEQ ID NO: 69 - protein, 13 aa, Artificial Sequence
  Synthetic sequence
GIINPSGGSTSYA

SEQ ID NO: 70 - protein, 14 aa, Artificial Sequence
  Synthetic sequence
CAREGRLSYGMDAW

SEQ ID NO: 71 - protein, 11 aa, Artificial Sequence
  Synthetic sequence
RASQSISSYLA

SEQ ID NO: 72 - protein, 7 aa, Artificial Sequence
  Synthetic sequence
GASTLES

SEQ ID NO: 73 - protein, 11 aa, Artificial Sequence
  Synthetic sequence
CQQTWGPPFTF

SEQ ID NO: 74 - protein, 246 aa, Artificial Sequence
  Synthetic sequence
QVQLVQSGAEVKKPGASVKVSCKASGYPFIGYYLHWVRQAPGQGLEWMGIINPSGGSTSYAQKFQGRVTMTRDTSTSTVYMELSSLRSEDTAVYYCAREGRLSYGMDAWGQGTLVTVSSGGGGSGGGGSGGGGSGGGGSDIQMTQSPSSLSASVGDRVTITCRASQSISSYLAWYQQKPGKAPKLLIYGASTLESGVPSRFSGSGSGTDFTLTISSLQPEDFATYYCQQTWGPPFTFGQGTKLEIK

SEQ ID NO: 75 - protein, 9 aa, Artificial Sequence
  Synthetic sequence
YPFIGQYLH

SEQ ID NO: 76 - protein, 246 aa, Artificial Sequence
  Synthetic sequence
QVQLVQSGAEVKKPGASVKVSCKASGYPFIGQYLHWVRQAPGQGLEWMGIINPSGGSTSYAQKFQGRVTMTRDTSTSTVYMELSSLRSEDTAVYYCAREGRLSYGMDAWGQGTLVTVSSGGGGSGGGGSGGGGSGGGGSDIQMTQSPSSLSASVGDRVTITCRASQSISSYLAWYQQKPGKAPKLLIYGASTLESGVPSRFSGSGSGTDFTLTISSLQPEDFATYYCQQTWGPPFTFGQGTKLEIK

SEQ ID NO: 77 - protein, 9 aa, Artificial Sequence
  Synthetic sequence
GTFSSYAIS

SEQ ID NO: 78 - protein, 13 aa, Artificial Sequence
  Synthetic sequence
GSINPSGDTTSYA

SEQ ID NO: 79 - protein, 16 aa, Artificial Sequence
  Synthetic sequence
CAKDKAQWLVGYFDYW

SEQ ID NO: 80 - protein, 11 aa, Artificial Sequence
  Synthetic sequence
QASQDISNSLN

SEQ ID NO: 81 - protein, 11 aa, Artificial Sequence
  Synthetic sequence
CQQSYSSVITF

SEQ ID NO: 82 - protein, 248 aa, Artificial Sequence
  Synthetic sequence
QVQLVQSGAEVKKPGASVKVSCKASGGTFSSYAISWVRQAPGQGLEWMGSINPSGDTTSYAQKFQGRVTMTRDTSTSTVYMELSSLRSEDTAVYYCAKDKAQWLVGYFDYWGQGTLVTVSSGGGGSGGGGSGGGGSGGGGSDIQMTQSPSSLSASVGDRVTITCQASQDISNSLNWYQQKPGKAPKLLIYAASSLQSGVPSRFSGSGSGTDFTLTISSLQPEDFATYYCQQSYSSVITFGQGTKVEIK

SEQ ID NO: 83 - protein, 9 aa, Artificial Sequence
  Synthetic sequence
FTFSSYWMH

SEQ ID NO: 84 - protein, 13 aa, Artificial Sequence
  Synthetic sequence
SSISPGGSNIDYA

SEQ ID NO: 85 - protein, 13 aa, Artificial Sequence
  Synthetic sequence
CAREVQLSHYDYW

SEQ ID NO: 86 - protein, 11 aa, Artificial Sequence
  Synthetic sequence
RASQGISNSLA

SEQ ID NO: 87 - protein, 7 aa, Artificial Sequence
  Synthetic sequence
GASSLQS

SEQ ID NO: 88 - protein, 11 aa, Artificial Sequence [sequence omitted]

SEQ ID NO: 89 - protein, 245 aa, Artificial Sequence
  Synthetic sequence
EVQLLESGGGLVQPGGSLRLSCAASGFTFSSYWMHWVRQAPGKGLEWVSSISPGGSNIDYADSVKGRFTISRDNSKNTLYLQMNSLRAEDTAVYYCAREVQLSHYDYWGQGTLVTVSSGGGGSGGGGSGGGGSGGGGSDIQMTQSPSSLSASVGDRVTITCRASQGISNSLAWYQQKPGKAPKLLIYGASSLQSGVPSRFSGSGSGTDFTLTISSLQPEDFATYYCQQANSFPFTFGQGTKVEIK

SEQ ID NO: 90 - protein, 9 aa, Artificial Sequence
  Synthetic sequence
FTFNNYAFH

SEQ ID NO: 91 - protein, 13 aa, Artificial Sequence
  Synthetic sequence
SRINSYGTSTTYA

SEQ ID NO: 92 - protein, 16 aa, Artificial Sequence
  Synthetic sequence
CAREGPVAGYWYFDLW

SEQ ID NO: 93 - protein, 11 aa, Artificial Sequence
  Synthetic sequence
RASQIIGTNLA

SEQ ID NO: 94 - protein, 11 aa, Artificial Sequence [sequence omitted]

SEQ ID NO: 95 - protein, 248 aa, Artificial Sequence
  Synthetic sequence
EVQLLESGGGLVQPGGSLRLSCAASGFTFNNYAFHWVRQAPGKGLEWVSRINSYGTSTTYADSVKGRFTISRDNSKNTLYLQMNSLRAEDTAVYYCAREGPVAGYWYFDLWGQGTLVTVSSGGGGSGGGGSGGGGSGGGGSDIQMTQSPSSLSASVGDRVTITCRASQIIGTNLAWYQQKPGKAPKLLIYGASSLQSGVPSRFSGSGSGTDFTLTISSLQPEDFATYYCQQSYRLPFTFGQGTKVEIK

SEQ ID NO: 96 - protein, 9 aa, Artificial Sequence
  Synthetic sequence
YTFTGYHIH

SEQ ID NO: 97 - protein, 13 aa, Artificial Sequence
  Synthetic sequence
GIINPSGGSTIYA

SEQ ID NO: 98 - protein, 16 aa, Artificial Sequence
  Synthetic sequence
CAKDWSSWYLGPFDYW

SEQ ID NO: 99 - protein, 11 aa, Artificial Sequence
  Synthetic sequence
RASQNISSSLN

SEQ ID NO: 100 - protein, 11 aa, Artificial Sequence [sequence omitted]

SEQ ID NO: 101 - protein, 248 aa, Artificial Sequence
  Synthetic sequence
QVQLVQSGAEVKKPGASVKVSCKASGYTFTGYHIHWVRQAPGQGLEWMGIINPSGGSTIYAQKFQGRVTMTRDTSTSTVYMELSSLRSEDTAVYYCAKDWSSWYLGPFDYWGQGTLVTVSSGGGGSGGGGSGGGGSGGGGSDIQMTQSPSSLSASVGDRVTITCRASQNISSSLNWYQQKPGKAPKLLIYAASSLQSGVPSRFSGSGSGTDFTLTISSLQPEDFATYYCQQSYTTPYTFGQGTKVEIK

SEQ ID NO: 102 - protein, 9 aa, Artificial Sequence
  Synthetic sequence
FMFGDYAMH

SEQ ID NO: 103 - protein, 13 aa, Artificial Sequence
  Synthetic sequence
SAISGSGGSTYYA

SEQ ID NO: 104 - protein, 16 aa, Artificial Sequence
  Synthetic sequence
CAKDLVVAGIWYFDLW

SEQ ID NO: 105 - protein, 11 aa, Artificial Sequence
  Synthetic sequence
RASQGISNNLN

SEQ ID NO: 106 - protein, 7 aa, Artificial Sequence
  Synthetic sequence
DASSLES

SEQ ID NO: 107 - protein, 11 aa, Artificial Sequence [sequence omitted]

SEQ ID NO: 108 - protein, 248 aa, Artificial Sequence
  Synthetic sequence
EVQLLESGGGLVQPGGSLRLSCAASGFMFGDYAMHWVRQAPGKGLEWVSAISGSGGSTYYADSVKGRFTISRDNSKNTLYLQMNSLRAEDTAVYYCAKDLVVAGIWYFDLWGRGTLVTVSSGGGGSGGGGSGGGGSGGGGSDIQMTQSPSSLSASVGDRVTITCRASQGISNNLNWYQQKPGKAPKLLIYDASSLESGVPSRFSGSGSGTDFTLTISSLQPEDFATYYCQQTHSFPSTFGQGTKLEIK

SEQ ID NO: 109 - protein, 9 aa, Artificial Sequence
  Synthetic sequence
FTFSDYYMN

SEQ ID NO: 110 - protein, 13 aa, Artificial Sequence
  Synthetic sequence
SVIGESGGSTYYA

SEQ ID NO: 111 - protein, 18 aa, Artificial Sequence
  Synthetic sequence
CAADPVSRWPKHGGGDYW

SEQ ID NO: 112 - protein, 11 aa, Artificial Sequence
  Synthetic sequence
RASQGISSSLA

SEQ ID NO: 113 - protein, 7 aa, Artificial Sequence
  Synthetic sequence
AASTLQS

SEQ ID NO: 114 - protein, 11 aa, Artificial Sequence [sequence omitted]

SEQ ID NO: 115 - protein, 250 aa, Artificial Sequence
  Synthetic sequence
EVQLLESGGGLVQPGGSLRLSCAASGFTFSDYYMNWVRQAPGKGLEWVSVIGESGGSTYYADSVKGRFTISRDNSKNTLYLQMNSLRAEDTAVYYCAADPVSRWPKHGGGDYWGQGTLVTVSSGGGGSGGGGSGGGGSGGGGSDIQMTQSPSSLSASVGDRVTITCRASQGISSSLAWYQQKPGKAPKLLIYAASTLQSGVPSRFSGSGSGTDFTLTISSLQPEDFATYYCQQSYSTPWTFGQGTKVEIK

SEQ ID NO: 116 - protein, 9 aa, Artificial Sequence
  Synthetic sequence
YTLTTWYMY

SEQ ID NO: 117 - protein, 13 aa, Artificial Sequence
  Synthetic sequence
GWINPNRGATNYA

SEQ ID NO: 118 - protein, 13 aa, Artificial Sequence
  Synthetic sequence
CAKGDLWGAMDVW

SEQ ID NO: 119 - protein, 11 aa, Artificial Sequence
  Synthetic sequence
RASDNIGSWLA

SEQ ID NO: 120 - protein, 11 aa, Artificial Sequence [sequence omitted]

SEQ ID NO: 121 - protein, 245 aa, Artificial Sequence
  Synthetic sequence
QVQLVQSGAEVKKPGASVKVSCKASGYTLTTWYMYWVRQAPGQGLEWMGWINPNRGATNYAQKFQGRVTMTRDTSTSTVYMELSSLRSEDTAVYYCAKGDLWGAMDVWGQGTLVTVSSGGGGSGGGGSGGGGSGGGGSDIQMTQSPSSLSASVGDRVTITCRASDNIGSWLAWYQQKPGKAPKLLIYAASSLQSGVPSRFSGSGSGTDFTLTISSLQPEDFATYYCQQGYSTPPTFGQGTKVEIK

SEQ ID NO: 122 - protein, 9 aa, Artificial Sequence
  Synthetic sequence
YTFTTYYMH

SEQ ID NO: 123 - protein, 13 aa, Artificial Sequence
  Synthetic sequence
GGFDPEDGETIYA

SEQ ID NO: 124 - protein, 22 aa, Artificial Sequence
  Synthetic sequence
CARHAVAGAVGAGYYYYGMDVW

SEQ ID NO: 125 - protein, 11 aa, Artificial Sequence
  Synthetic sequence
RASESISNWLA

SEQ ID NO: 126 - protein, 11 aa, Artificial Sequence [sequence omitted]

SEQ ID NO: 127 - protein, 254 aa, Artificial Sequence
  Synthetic sequence
QVQLVQSGAEVKKPGASVKVSCKASGYTFTTYYMHWVRQAPGQGLEWMGGFDPEDGETIYAQKFQGRVTMTRDTSTSTVYMELSSLRSEDTAVYYCARHAVAGAVGAGYYYYGMDVWGQGTMVTVSSGGGGSGGGGSGGGGSGGGGSDIQMTQSPSSLSASVGDRVTITCRASESISNWLAWYQQKPGKAPKLLIYAASTLQSGVPSRFSGSGSGTDFTLTISSLQPEDFATYYCQQSYSVPFTFGPGTKVDIK

SEQ ID NO: 128 - protein, 9 aa, Artificial Sequence
  Synthetic sequence
YTFTGYYMH

SEQ ID NO: 129 - protein, 13 aa, Artificial Sequence
  Synthetic sequence
GWIGPNSGDTNYA

SEQ ID NO: 130 - protein, 14 aa, Artificial Sequence
  Synthetic sequence
CARDLDHNWYFDLW

SEQ ID NO: 131 - protein, 16 aa, Artificial Sequence
  Synthetic sequence
RSSQSLLHSNGYNYLD

SEQ ID NO: 132 - protein, 7 aa, Artificial Sequence
  Synthetic sequence
SSSNRAP

SEQ ID NO: 133 - protein, 11 aa, Artificial Sequence [sequence omitted]

SEQ ID NO: 134 - protein, 251 aa, Artificial Sequence
  Synthetic sequence
QVQLVQSGAEVKKPGASVKVSCKASGYTFTGYYMHWVRQAPGQGLEWMGWIGPNSGDTNYAQKFQGRVTMTRDTSTSTVYMELSSLRSEDTAVYYCARDLDHNWYFDLWGRGTLVTVSSGGGGSGGGGSGGGGSGGGGSDIVMTQSPLSLPVTPGEPASISCRSSQSLLHSNGYNYLDWYLQKPGQSPQLLIYSSSNRAPGVPDRFSGSGSGTDFTLKISRVEAEDVGVYYCMQALHIPLTFGGGTKVEIK

SEQ ID NO: 135 - protein, 9 aa, Artificial Sequence
  Synthetic sequence
FTFDDYAMH

SEQ ID NO: 136 - protein, 13 aa, Artificial Sequence
  Synthetic sequence
SYIDASGTTIYYA

SEQ ID NO: 137 - protein, 16 aa, Artificial Sequence
  Synthetic sequence
CAKDQAAAGYWYFDLW

SEQ ID NO: 138 - protein, 11 aa, Artificial Sequence
  Synthetic sequence
QASQDISNYLN

SEQ ID NO: 139 - protein, 7 aa, Artificial Sequence
  Synthetic sequence
KASTLES

SEQ ID NO: 140 - protein, 11 aa, Artificial Sequence [sequence omitted]

SEQ ID NO: 141 - protein, 248 aa, Artificial Sequence
  Synthetic sequence
EVQLLESGGGLVQPGGSLRLSCAASGFTFDDYAMHWVRQAPGKGLEWVSYIDASGTTIYYADSVKGRFTISRDNSKNTLYLQMNSLRAEDTAVYYCAKDQAAAGYWYFDLWGRGTLVTVSSGGGGSGGGGSGGGGSGGGGSDIQMTQSPSSLSASVGDRVTITCQASQDISNYLNWYQQKPGKAPKLLIYKASTLESGVPSRFSGSGSGTDFTLTISSLQPEDFATYYCQQSYSTPITFGQGTRLEIK

SEQ ID NO: 142 - protein, 9 aa, Artificial Sequence
  Synthetic sequence
YTFTDYHIH

SEQ ID NO: 143 - protein, 13 aa, Artificial Sequence
  Synthetic sequence
GGIVPRSGSTTYA

SEQ ID NO: 144 - protein, 15 aa, Artificial Sequence
  Synthetic sequence
CAKDESSGWYYFDYW

SEQ ID NO: 145 - protein, 7 aa, Artificial Sequence
  Synthetic sequence
SAYNRAS

SEQ ID NO: 146 - protein, 11 aa, Artificial Sequence [sequence omitted]

SEQ ID NO: 147 - protein, 252 aa, Artificial Sequence
  Synthetic sequence
QVQLVQSGAEVKKPGSSVKVSCKASGYTFTDYHIHWVRQAPGQGLEWMGGIVPRSGSTTYAQKFQGRVTITADESTSTAYMELSSLRSEDTAVYYCAKDESSGWYYFDYWGQGTLVTVSSGGGGSGGGGSGGGGSGGGGSDIVMTQSPLSLPVTPGEPASISCRSSQSLLHSNGYNYLDWYLQKPGQSPQLLIYSAYNRASGVPDRFSGSGSGTDFTLKISRVEAEDVGVYYCMQALQTPLTFGQGTKVEIK

SEQ ID NO: 148 - protein, 9 aa, Artificial Sequence
  Synthetic sequence
YTFTNYYMH

SEQ ID NO: 149 - protein, 13 aa, Artificial Sequence
  Synthetic sequence
GGIIPIVDRVKYA

SEQ ID NO: 150 - protein, 17 aa, Artificial Sequence
  Synthetic sequence
CAKGRYTVNYYYGMDVW

SEQ ID NO: 151 - protein, 11 aa, Artificial Sequence
  Synthetic sequence
QANQDISNYLN

SEQ ID NO: 152 - protein, 7 aa, Artificial Sequence
  Synthetic sequence
RASKLEA

SEQ ID NO: 153 - protein, 11 aa, Artificial Sequence
  Synthetic sequence
CQQSSEIPYSF

SEQ ID NO: 154 - protein, 249 aa, Artificial Sequence
  Synthetic sequence
QVQLVQSGAEVKKPGSSVKVSCKASGYTFTNYYMHWVRQAPGQGLEWMGGIIPIVDRVKYAQKFQGRVTITADESTSTAYMELSSLRSEDTAVYYCAKGRYTVNYYYGMDVWGQGTTVTVSSGGGGSGGGGSGGGGSGGGGSDIQMTQSPSSLSASVGDRVTITCQANQDISNYLNWYQQKPGKAPKLLIYRASKLEAGVPSRFSGSGSGTDFTLTISSLQPEDFATYYCQQSSEIPYSFGQGTKLEIK

SEQ ID NO: 155 - protein, 9 aa, Artificial Sequence
  Synthetic sequence
FTFEDYAMH

SEQ ID NO: 156 - protein, 13 aa, Artificial Sequence
  Synthetic sequence
SYLNSDGGSTSYA

SEQ ID NO: 157 - protein, 16 aa, Artificial Sequence
  Synthetic sequence
CAKDYCTNGVCAFDYW

SEQ ID NO: 158 - protein, 11 aa, Artificial Sequence
  Synthetic sequence
RASQSISTYLN

SEQ ID NO: 159 - protein, 7 aa, Artificial Sequence
  Synthetic sequence
DASNLET

SEQ ID NO: 160 - protein, 11 aa, Artificial Sequence [sequence omitted]

SEQ ID NO: 161 - protein, 248 aa, Artificial Sequence
  Synthetic sequence
EVQLLESGGGLVQPGGSLRLSCAASGFTFEDYAMHWVRQAPGKGLEWVSYLNSDGGSTSYADSVKGRFTISRDNSKNTLYLQMNSLRAEDTAVYYCAKDYCTNGVCAFDYWGQGTLVTVSSGGGGSGGGGSGGGGSGGGGSDIQMTQSPSSLSASVGDRVTITCRASQSISTYLNWYQQKPGKAPKLLIYDASNLETGVPSRFSGSGSGTDFTLTISSLQPEDFATYYCQQSYTIPITFGQGTRLEIK

SEQ ID NO: 162 - protein, 9 aa, Artificial Sequence
  Synthetic sequence
FTFSDSAMH

SEQ ID NO: 163 - protein, 13 aa, Artificial Sequence
  Synthetic sequence
SAISGSGSTIYYA

SEQ ID NO: 164 - protein, 16 aa, Artificial Sequence
  Synthetic sequence
CVSDIAVAGHWYFDLW

SEQ ID NO: 165 - protein, 11 aa, Artificial Sequence
  Synthetic sequence
RASQSISTFLN

SEQ ID NO: 166 - protein, 7 aa, Artificial Sequence
  Synthetic sequence
AASRLEG

SEQ ID NO: 167 - protein, 11 aa, Artificial Sequence [sequence omitted]

SEQ ID NO: 168 - protein, 248 aa, Artificial Sequence
  Synthetic sequence
EVQLLESGGGLVQPGGSLRLSCAASGFTFSDSAMHWVRQAPGKGLEWVSAISGSGSTIYYADSVKGRFTISRDNSKNTLYLQMNSLRAEDTAVYYCVSDIAVAGHWYFDLWGRGTLVTVSSGGGGSGGGGSGGGGSGGGGSDIQMTQSPSSLSASVGDRVTITCRASQSISTFLNWYQQKPGKAPKLLIYAASRLEGGVPSRFSGSGSGTDFTLTISSLQPEDFATYYCQQANSFPLTFGPGTKVDIK

SEQ ID NO: 169 - protein, 9 aa, Artificial Sequence
  Synthetic sequence
FTFSSYWMS

SEQ ID NO: 170 - protein, 13 aa, Artificial Sequence
  Synthetic sequence
SYISGDSGYTNYA

SEQ ID NO: 171 - protein, 17 aa, Artificial Sequence
  Synthetic sequence
CARANSSGWYDWYFDLW

SEQ ID NO: 172 - protein, 11 aa, Artificial Sequence
  Synthetic sequence
RASQSISSYLN

SEQ ID NO: 173 - protein, 11 aa, Artificial Sequence [sequence omitted]

SEQ ID NO: 174 - protein, 249 aa, Artificial Sequence
  Synthetic sequence
EVQLVESGGGLVKPGGSLRLSCAASGFTFSSYWMSWVRQAPGKGLEWVSYISGDSGYTNYAAPVKGRFTISRDDSKNTLYLQMNSLKTEDTAVYYCARANSSGWYDWYFDLWGRGTLVTVSSGGGGSGGGGSGGGGSGGGGSDIQMTQSPSSLSASVGDRVTITCRASQSISSYLNWYQQKPGKAPKLLIYAASSLQSGVPSRFSGSGSGTDFTLTISSLQPEDFATYYCQQSYSTPLTFGGGTKVEIK

SEQ ID NO: 175 - protein, 13 aa, Artificial Sequence
  Synthetic sequence
SGISWNSGSIGYA

SEQ ID NO: 176 - protein, 18 aa, Artificial Sequence
  Synthetic sequence
CAKDIVAAGHYYYGMDVW

SEQ ID NO: 177 - protein, 250 aa, Artificial Sequence
  Synthetic sequence
EVQLLESGGGLVQPGGSLRLSCAASGFTFDDYAMHWVRQAPGKGLEWVSGISWNSGSIGYADSVKGRFTISRDNSKNTLYLQMNSLRAEDTAVYYCAKDIVAAGHYYYGMDVWGQGTTVTVSSGGGGSGGGGSGGGGSGGGGSDIQMTQSPSSLSASVGDRVTITCQASQDISNYLNWYQQKPGKAPKLLIYDASNLETGVPSRFSGSGSGTDFTLTISSLQPEDFATYYCQQSYSTPLTFGGGTKVEIK

SEQ ID NO: 178 - protein, 13 aa, Artificial Sequence
  Synthetic sequence
SYIDTSSSHLYYA

SEQ ID NO: 179 - protein, 16 aa, Artificial Sequence
  Synthetic sequence
CARDEAAAGYYGMDVW

SEQ ID NO: 180 - protein, 11 aa, Artificial Sequence
  Synthetic sequence
QAGQDISNYLN

SEQ ID NO: 181 - protein, 11 aa, Artificial Sequence [sequence omitted]

SEQ ID NO: 182 - protein, 248 aa, Artificial Sequence
  Synthetic sequence
EVQLLESGGGLVQPGGSLRLSCAASGFTFDDYAMHWVRQAPGKGLEWVSYIDTSSSHLYYADSVKGRFTISRDNSKNTLYLQMNSLRAEDTAVYYCARDEAAAGYYGMDVWGQGTTVTVSSGGGGSGGGGSGGGGSGGGGSDIQMTQSPSSLSASVGDRVTITCQAGQDISNYLNWYQQKPGKAPKLLIYDASNLETGVPSRFSGSGSGTDFTLTISSLQPEDFATYYCQQTYSTPITFGQGTKLEIK

SEQ ID NO: 183 - protein, 9 aa, Artificial Sequence
  Synthetic sequence
FTFSNAWMS

SEQ ID NO: 184 - protein, 13 aa, Artificial Sequence
  Synthetic sequence
STIVGNGGATYYA

SEQ ID NO: 185 - protein, 15 aa, Artificial Sequence
  Synthetic sequence
CARDNPLRWQGMDVW

SEQ ID NO: 186 - protein, 11 aa, Artificial Sequence
  Synthetic sequence
RASQDISNYLN

SEQ ID NO: 187 - protein, 11 aa, Artificial Sequence [sequence omitted]

SEQ ID NO: 188 - protein, 247 aa, Artificial Sequence
  Synthetic sequence
EVQLLESGGGLVQPGGSLRLSCAASGFTFSNAWMSWVRQAPGKGLEWVSTIVGNGGATYYADSVKGRFTISRDNSKNTLYLQMNSLRAEDTAVYYCARDNPLRWQGMDVWGQGTLVTVSSGGGGSGGGGSGGGGSGGGGSDIQMTQSPSSLSASVGDRVTITCRASQDISNYLNWYQQKPGKAPKLLIYAASSLQSGVPSRFSGSGSGTDFTLTISSLQPEDFATYYCQQSYSIPPTFGPGTKVDIK

SEQ ID NO: 189 - protein, 9 aa, Artificial Sequence
  Synthetic sequence
FTFSSYQMS

SEQ ID NO: 190 - protein, 13 aa, Artificial Sequence
  Synthetic sequence
SYISSSSTYTNYA

SEQ ID NO: 191 - protein, 17 aa, Artificial Sequence
  Synthetic sequence
CARANSSSWYDWYFDLW

SEQ ID NO: 192 - protein, 249 aa, Artificial Sequence
  Synthetic sequence
EVQLLESGGGLVQPGGSLRLSCAASGFTFSSYQMSWVRQAPGKGLEWVSYISSSSTYTNYADSVKGRFTISRDNSKNTLYLQMNSLRAEDTAVYYCARANSSSWYDWYFDLWGQGTLVTVSSGGGGSGGGGSGGGGSGGGGSDIQMTQSPSSLSASVGDRVTITCRASQSISSYLNWYQQKPGKAPKLLIYAASSLQSGVPSRFSGSGSGTDFTLTISSLQPEDFATYYCQQSYSTPLTFGGGTKVEIK

SEQ ID NO: 193 - protein, 9 aa, Artificial Sequence
  Synthetic sequence
FTFSSYAMH

SEQ ID NO: 194 - protein, 13 aa, Artificial Sequence
  Synthetic sequence
SGISGSGGSAYYA

SEQ ID NO: 195 - protein, 18 aa, Artificial Sequence
  Synthetic sequence
CATSQAPVDYYYYGMDVW

SEQ ID NO: 196 - protein, 11 aa, Artificial Sequence
  Synthetic sequence
RASQSISSWLA

SEQ ID NO: 197 - protein, 7 aa, Artificial Sequence
  Synthetic sequence
AASNLQR

SEQ ID NO: 198 - protein, 11 aa, Artificial Sequence [sequence omitted]

SEQ ID NO: 199 - protein, 250 aa, Artificial Sequence
  Synthetic sequence
EVQLLESGGGLVQPGGSLRLSCAASGFTFSSYAMHWVRQAPGKGLEWVSGISGSGGSAYYADSVKGRFTISRDNSKNTLYLQMNSLRAEDTAVYYCATSQAPVDYYYYGMDVWGQGTTVTVSSGGGGSGGGGSGGGGSGGGGSDIQMTQSPSSLSASVGDRVTITCRASQSISSWLAWYQQKPGKAPKLLIYAASNLQRGVPSRFSGSGSGTDFTLTISSLQPEDFATYYCQQSYSIPITFGQGTKVEIK

SEQ ID NO: 200 - protein, 13 aa, Artificial Sequence
  Synthetic sequence
SYISGSSSYTNYA

SEQ ID NO: 201 - protein, 17 aa, Artificial Sequence
  Synthetic sequence
CARVGSSGWYDWYFDLW

SEQ ID NO: 202 - protein, 249 aa, Artificial Sequence
  Synthetic sequence
EVQLVESGGGLVKPGGSLRLSCAASGFTFSSYWMSWVRQAPGKGLEWVSYISGSSSYTNYAAPVKGRFTISRDDSKNTLYLQMNSLKTEDTAVYYCARVGSSGWYDWYFDLWGRGTLVTVSSGGGGSGGGGSGGGGSGGGGSDIQMTQSPSSLSASVGDRVTITCRASQSISSYLNWYQQKPGKAPKLLIYAASSLQSGVPSRFSGSGSGTDFTLTISSLQPEDFATYYCQQSYSTPLTFGQGTKVEIK

SEQ ID NO: 203 - protein, 245 aa, Artificial Sequence
  Synthetic sequence
QVQLVQSGAEVKKPGASVKVSCKASGYTLTTWYMYWVRQAPGQGLEWMGWINPNRGATNYAQKFQGRVTMTRDTSTSTVYMELSSLRSEDTAVYYCAKGDLWGAMDVWGQGTTVTVSSGGGGSGGGGSGGGGSGGGGSDIQMTQSPSSLSASVGDRVTITCRASDNIGSWLAWYQQKPGKAPKLLIYAASSLQSGVPSRFSGSGSGTDFTLTISSLQPEDFATYYCQQGYSTPPTFGQGTKVEIK

SEQ ID NO: 204 - protein, 9 aa, Artificial Sequence
  Synthetic sequence
YTFTGYYIH

SEQ ID NO: 205 - protein, 13 aa, Artificial Sequence
  Synthetic sequence
GWMNPNSGNTGYA

SEQ ID NO: 206 - protein, 24 aa, Artificial Sequence
  Synthetic sequence
CARDPGFLGYCSGGSCYDGWFDPW

SEQ ID NO: 207 - protein, 11 aa, Artificial Sequence
  Synthetic sequence
RASQSISSYLH

SEQ ID NO: 208 - protein, 11 aa, Artificial Sequence [sequence omitted]

SEQ ID NO: 209 - protein, 256 aa, Artificial Sequence
  Synthetic sequence
QVQLVQSGAEVKKPGASVKVSCKASGYTFTGYYIHWVRQAPGQGLEWMGWMNPNSGNTGYAQKFQGRVTMTRDTSTSTVYMELSSLRSEDTAVYYCARDPGFLGYCSGGSCYDGWFDPWGQGTLVTVSSGGGGSGGGGSGGGGSGGGGSDIQMTQSPSSLSASVGDRVTITCRASQSISSYLHWYQQKPGKAPKLLIYAASSLQSGVPSRFSGSGSGTDFTLTISSLQPEDFATYYCQQSYTAPYTFGQGTKLEIK

SEQ ID NO: 210 - protein, 9 aa, Artificial Sequence
  Synthetic sequence
YTFTDYFLH

SEQ ID NO: 211 - protein, 13 aa, Artificial Sequence
  Synthetic sequence
GWMNPTSGNTGYA

SEQ ID NO: 212 - protein, 13 aa, Artificial Sequence
  Synthetic sequence
CAREGEGSGFDYW

SEQ ID NO: 213 - protein, 11 aa, Artificial Sequence
  Synthetic sequence
RASQGINSWLA

SEQ ID NO: 214 - protein, 245 aa, Artificial Sequence
  Synthetic sequence
QVQLVQSGAEVKKPGASVKVSCKASGYTFTDYFLHWVRQAPGQGLEWMGWMNPTSGNTGYAQKFQGRVTMTRDTSTSTVYMELSSLRSEDTAVYYCAREGEGSGFDYWGQGTLVTVSSGGGGSGGGGSGGGGSGGGGSDIQMTQSPSSLSASVGDRVTITCRASQGINSWLAWYQQKPGKAPKLLIYDASNLETGVPSRFSGSGSGTDFTLTISSLQPEDFATYYCQQSYSTPLTFGGGTKVEIK

SEQ ID NO: 215 - protein, 9 aa, Artificial Sequence
  Synthetic sequence
YTFTSYYMH

SEQ ID NO: 216 - protein, 13 aa, Artificial Sequence
  Synthetic sequence
AWMNPNSGNTGYA

SEQ ID NO: 217 - protein, 15 aa, Artificial Sequence
  Synthetic sequence
CARDYDFWSGSLGYW

SEQ ID NO: 218 - protein, 11 aa, Artificial Sequence
  Synthetic sequence
RASQGISNYLA

SEQ ID NO: 219 - protein, 247 aa, Artificial Sequence
  Synthetic sequence
QVQLVQSGAEVKKPGASVKVSCKASGYTFTSYYMHWVRQAPGQGLEWMAWMNPNSGNTGYAQKFQGRVTMTRDTSTSTVYMELSSLRSEDTAVYYCARDYDFWSGSLGYWGQGTLVTVSSGGGGSGGGGSGGGGSGGGGSDIQMTQSPSSLSASVGDRVTITCRASQGISNYLAWYQQKPGKAPKLLIYAASSLQSGVPSRFSGSGSGTDFTLTISSLQPEDFATYYCQQSYSTPWTFGQGTKVEIK

SEQ ID NO: 220 - protein, 20 aa, Artificial Sequence
  Synthetic sequence
CARDTGYSYGRYYYYGMDVW

SEQ ID NO: 221 - protein, 11 aa, Artificial Sequence
  Synthetic sequence
RASQSIGRWLA

SEQ ID NO: 222 - protein, 7 aa, Artificial Sequence
  Synthetic sequence
DASNLQS

SEQ ID NO: 223 - protein, 252 aa, Artificial Sequence
  Synthetic sequence
QVQLVQSGAEVKKPGASVKVSCKASGYTFTSYYMHWVRQAPGQGLEWMGIINPSGGSTSYAQKFQGRVTMTRDTSTSTVYMELSSLRSEDTAVYYCARDTGYSYGRYYYYGMDVWGQGTLVTVSSGGGGSGGGGSGGGGSGGGGSDIQMTQSPSSLSASVGDRVTITCRASQSIGRWLAWYQQKPGKAPKLLIYDASNLQSGVPSRFSGSGSGTDFTLTISSLQPEDFATYYCQQSYSIPITFGQGTKVEIK

SEQ ID NO: 224 - protein, 9 aa, Artificial Sequence
  Synthetic sequence
YTLTDYYMH

SEQ ID NO: 225 - protein, 16 aa, Artificial Sequence
  Synthetic sequence
CAREEYSSSSGYFDYW

SEQ ID NO: 226 - protein, 11 aa, Artificial Sequence
  Synthetic sequence
RASQGISSWLA

SEQ ID NO: 227 - protein, 248 aa, Artificial Sequence
  Synthetic sequence
QVQLVQSGAEVKKPGASVKVSCKASGYTLTDYYMHWVRQAPGQGLEWMGIINPSGGSTSYAQKFQGRVTMTRDTSTSTVYMELSSLRSEDTAVYYCAREEYSSSSGYFDYWGQGTLVTVSSGGGGSGGGGSGGGGSGGGGSDIQMTQSPSSLSASVGDRVTITCRASQGISSWLAWYQQKPGKAPKLLIYAASSLQSGVPSRFSGSGSGTDFTLTISSLQPEDFATYYCQQSYSTPLTFGQGTKVEIK

SEQ ID NO: 228 - protein, 9 aa, Artificial Sequence
  Synthetic sequence
YTFTSYGIS

SEQ ID NO: 229 - protein, 13 aa, Artificial Sequence
  Synthetic sequence
GWMHPKSGDTGLT

SEQ ID NO: 230 - protein, 15 aa, Artificial Sequence [sequence omitted]

SEQ ID NO: 231 - protein, 11 aa, Artificial Sequence [sequence omitted]

SEQ ID NO: 232 - protein, 247 aa, Artificial Sequence
  Synthetic sequence
QVQLVQSGAEVKKPGASVKVSCKASGYTFTSYGISWVRQAPGQGLEWMGWMHPKSGDTGLTQKFQGRVTMTRDTSTSTVYMELSSLRSEDTAVYYCARDTPYYYYGMDVWGQGTTVTVSSGGGGSGGGGSGGGGSGGGGSDIQMTQSPSSLSASVGDRVTITCRASQSISSWLAWYQQKPGKAPKLLIYAASSLQSGVPSRFSGSGSGTDFTLTISSLQPEDFATYYCQQSYSVPITFGQGTKVEIK

SEQ ID NO: 233 - protein, 9 aa, Artificial Sequence
  Synthetic sequence
FTFGDYAMS

SEQ ID NO: 234 - protein, 13 aa, Artificial Sequence
  Synthetic sequence
SYISGDIGYTNYA

SEQ ID NO: 235 - protein, 16 aa, Artificial Sequence
  Synthetic sequence
CARDVAATGNWYFDLW

SEQ ID NO: 236 - protein, 248 aa, Artificial Sequence
  Synthetic sequence
EVQLVESGGGLVKPGGSLRLSCAASGFTFGDYAMSWVRQAPGKGLEWVSYISGDIGYTNYAAPVKGRFTISRDDSKNTLYLQMNSLKTEDTAVYYCARDVAATGNWYFDLWGRGTLVTVSSGGGGSGGGGSGGGGSGGGGSDIQMTQSPSSLSASVGDRVTITCRASQSISSYLNWYQQKPGKAPKLLIYAASSLQSGVPSRFSGSGSGTDFTLTISSLQPEDFATYYCQQSYSTPLTFGGGTKVEIK

SEQ ID NO: 237 - protein, 9 aa, Artificial Sequence
  Synthetic sequence
FSFSSYTMN

SEQ ID NO: 238 - protein, 13 aa, Artificial Sequence
  Synthetic sequence
SFITSSSRTIYYA

SEQ ID NO: 239 - protein, 18 aa, Artificial Sequence
  Synthetic sequence
CARDRRGDYGDSWYFDLW

SEQ ID NO: 240 - protein, 11 aa, Artificial Sequence
  Synthetic sequence
RASQSVRNYLA

SEQ ID NO: 241 - protein, 7 aa, Artificial Sequence
  Synthetic sequence
GASTRAT

SEQ ID NO: 242 - protein, 11 aa, Artificial Sequence [sequence omitted]

SEQ ID NO: 243 - protein, 250 aa, Artificial Sequence
  Synthetic sequence
EVQLLESGGGLVQPGGSLRLSCAASGFSFSSYTMNWVRQAPGKGLEWVSFITSSSRTIYYADSVKGRFTISRDNSKNTLYLQMNSLRAEDTAVYYCARDRRGDYGDSWYFDLWGRGTLVTVSSGGGGSGGGGSGGGGSGGGGSEIVMTQSPATLSVSPGERATLSCRASQSVRNYLAWYQQKPGQAPRLLIYGASTRATGIPARFSGSGSGTEFTLTISSLQSEDFAVYYCQQYGSSPLTFGGGTKVEIK

SEQ ID NO: 244 - protein, 9 aa, Artificial Sequence
  Synthetic sequence
YTFTGHYMH

SEQ ID NO: 245 - protein, 252 aa, Artificial Sequence
  Synthetic sequence
QVQLVQSGAEVKKPGASVKVSCKASGYTFTGHYMHWVRQAPGQGLEWMGIINPSGGSTSYAQKFQGRVTMTRDTSTSTVYMELSSLRSEDTAVYYCARDTGYSYGRYYYYGMDVWGQGTTVTVSSGGGGSGGGGSGGGGSGGGGSDIQMTQSPSSLSASVGDRVTITCRASQSIGRWLAWYQQKPGKAPKLLIYDASNLQSGVPSRFSGSGSGTDFTLTISSLQPEDFATYYCQQSYSIPITFGGGTKVEIK

SEQ ID NO: 246 - protein, 9 aa, Artificial Sequence
  Synthetic sequence
YTFSKHFVH

SEQ ID NO: 247 - protein, 13 aa, Artificial Sequence
  Synthetic sequence
GWMNPNSGNSGYA

SEQ ID NO: 248 - protein, 16 aa, Artificial Sequence
  Synthetic sequence
CARGEGGYYYYGMDVW

SEQ ID NO: 249 - protein, 248 aa, Artificial Sequence
  Synthetic sequence
QVQLVQSGAEVKKPGASVKVSCKASGYTFSKHFVHWVRQAPGQGLEWMGWMNPNSGNSGYAQKFQGRVTMTRDTSTSTVYMELSSLRSEDTAVYYCARGEGGYYYYGMDVWGQGTLVTVSSGGGGSGGGGSGGGGSGGGGSDIQMTQSPSSLSASVGDRVTITCRASQSISSWLAWYQQKPGKAPKLLIYAASTLQSGVPSRFSGSGSGTDFTLTISSLQPEDFATYYCQQSYSTPWTFGQGTKVEIK

SEQ ID NO: 250 - protein, 9 aa, Artificial Sequence
  Synthetic sequence
FTFGSYSMS

SEQ ID NO: 251 - protein, 12 aa, Artificial Sequence
  Synthetic sequence
SAIGTGGGTYYA

SEQ ID NO: 252 - protein, 16 aa, Artificial Sequence
  Synthetic sequence
CAKGTPYYYYYGMDVW

SEQ ID NO: 253 - protein, 11 aa, Artificial Sequence
  Synthetic sequence
RASQPLSNWLA

SEQ ID NO: 254 - protein, 11 aa, Artificial Sequence [sequence omitted]

SEQ ID NO: 255 - protein, 247 aa, Artificial Sequence
  Synthetic sequence
EVQLLESGGGLVQPGGSLRLSCAASGFTFGSYSMSWVRQAPGKGLEWVSAIGTGGGTYYADSVKGRFTISRDNSKNTLYLQMNSLRAEDTAVYYCAKGTPYYYYYGMDVWGQGTMVTVSSGGGGSGGGGSGGGGSGGGGSDIQMTQSPSSLSASVGDRVTITCRASQPLSNWLAWYQQKPGKAPKLLIYAASSLQSGVPSRFSGSGSGTDFTLTISSLQPEDFATYYCQQAISFPLTFGGGTKVEIK

SEQ ID NO: 256 - protein, 20 aa, Artificial Sequence
  Synthetic sequence
CARDLGYYDSSGYFGAFDIW

SEQ ID NO: 257 - protein, 11 aa, Artificial Sequence
  Synthetic sequence
QSSEDISSSLN

SEQ ID NO: 258 - protein, 7 aa, Artificial Sequence
  Synthetic sequence
AASSLQI

SEQ ID NO: 259 - protein, 11 aa, Artificial Sequence [sequence omitted]

SEQ ID NO: 260 - protein, 252 aa, Artificial Sequence
  Synthetic sequence
QVQLVQSGAEVKKPGASVKVSCKASGYTFTSYYMHWVRQAPGQGLEWMGWMNPNSGNTGYAQKFQGRVTMTRDTSTSTVYMELSSLRSEDTAVYYCARDLGYYDSSGYFGAFDIWGQGTTVTVSSGGGGSGGGGSGGGGSGGGGSDIQMTQSPSSLSASVGDRVTITCQSSEDISSSLNWYQQKPGKAPKLLIYAASSLQIGVPSRFSGSGSGTDFTLTISSLQPEDFATYYCQQTYSTPYTFGQGTKVEIK

SEQ ID NO: 261 - protein, 13 aa, Artificial Sequence
  Synthetic sequence
GIINPRGGSTIFA

SEQ ID NO: 262 - protein, 17 aa, Artificial Sequence
  Synthetic sequence
CARGTRSSGWYGWFDPW

SEQ ID NO: 263 - protein, 11 aa, Artificial Sequence
  Synthetic sequence
RASQGIGNWLA

SEQ ID NO: 264 - protein, 7 aa, Artificial Sequence
  Synthetic sequence
AASNLET

SEQ ID NO: 265 - protein, 11 aa, Artificial Sequence
  Synthetic sequence
CQQIHSYPLTF

SEQ ID NO: 266 - protein, 249 aa, Artificial Sequence
  Synthetic sequence
QVQLVQSGAEVKKPGASVKVSCKASGYTFTSYGISWVRQAPGQGLEWMGIINPRGGSTIFAQKFQGRVTMTRDTSTSTVYMELSSLRSEDTAVYYCARGTRSSGWYGWFDPWGQGTLVTVSSGGGGSGGGGSGGGGSGGGGSDIQMTQSPSSLSASVGDRVTITCRASQGIGNWLAWYQQKPGKAPKLLIYAASNLETGVPSRFSGSGSGTDFTLTISSLQPEDFATYYCQQIHSYPLTFGGGTKVEIK

SEQ ID NO: 267 - protein, 9 aa, Artificial Sequence
  Synthetic sequence
FTFDDYGMS

SEQ ID NO: 268 - protein, 13 aa, Artificial Sequence
  Synthetic sequence
SYISSSSSYIYYA

SEQ ID NO: 269 - protein, 16 aa, Artificial Sequence
  Synthetic sequence
CAREIAAAGFYGMDVW

SEQ ID NO: 270 - protein, 248 aa, Artificial Sequence
  Synthetic sequence
EVQLLESGGGLVQPGGSLRLSCAASGFTFDDYGMSWVRQAPGKGLEWVSYISSSSSYIYYADSVKGRFTISRDNSKNTLYLQMNSLRAEDTAVYYCAREIAAAGFYGMDVWGQGTTVTVSSGGGGSGGGGSGGGGSGGGGSDIQMTQSPSSLSASVGDRVTITCRASQSISSYLNWYQQKPGKAPKLLIYAASSLQSGVPSRFSGSGSGTDFTLTISSLQPEDFATYYCQQSYSTPLTFGGGTKVEIK

SEQ ID NO: 271 - protein, 9 aa, Artificial Sequence
  Synthetic sequence
GTLSRYGVS

SEQ ID NO: 272 - protein, 13 aa, Artificial Sequence
  Synthetic sequence
GGIIPIFGTTNYA

SEQ ID NO: 273 - protein, 21 aa, Artificial Sequence
  Synthetic sequence
CARDRVYYDSSGYPTWYFDLW

SEQ ID NO: 274 - protein, 12 aa, Artificial Sequence
  Synthetic sequence
RASQSVSSSYLA

SEQ ID NO: 275 - protein, 11 aa, Artificial Sequence [sequence omitted]

SEQ ID NO: 276 - protein, 254 aa, Artificial Sequence
  Synthetic sequence
QVQLVQSGAEVKKPGSSVKVSCKASGGTLSRYGVSWVRQAPGQGLEWMGGIIPIFGTTNYAQKFQGRVTITADESTSTAYMELSSLRSEDTAVYYCARDRVYYDSSGYPTWYFDLWGRGTLVTVSSGGGGSGGGGSGGGGSGGGGSEIVMTQSPATLSVSPGERATLSCRASQSVSSSYLAWYQQKPGQAPRLLIYGASTRATGIPARFSGSGSGTEFTLTISSLQSEDFAVYYCQQYGSSPITFGQGTKVEIK

SEQ ID NO: 277 - protein, 9 aa, Artificial Sequence
  Synthetic sequence
FTFDDFAMH

SEQ ID NO: 278 - protein, 13 aa, Artificial Sequence
  Synthetic sequence
SGISGNGDSRYYA

SEQ ID NO: 279 - protein, 16 aa, Artificial Sequence
  Synthetic sequence
CARDASYGGNYGMDVW

SEQ ID NO: 280 - protein, 11 aa, Artificial Sequence
  Synthetic sequence
QASQDIRNYLN

SEQ ID NO: 281 - protein, 248 aa, Artificial Sequence
  Synthetic sequence
EVQLLESGGGLVQPGGSLRLSCAASGFTFDDFAMHWVRQAPGKGLEWVSGISGNGDSRYYADSVKGRFTISRDNSKNTLYLQMNSLRAEDTAVYYCARDASYGGNYGMDVWGQGTTVTVSSGGGGSGGGGSGGGGSGGGGSDIQMTQSPSSLSASVGDRVTITCQASQDIRNYLNWYQQKPGKAPKLLIYKASTLESGVPSRFSGSGSGTDFTLTISSLQPEDFATYYCQQANSFPLTFGPGTKVDIK

SEQ ID NO: 282 - protein, 15 aa, Artificial Sequence
  Synthetic sequence
CAREWLVPYYGMDVW

SEQ ID NO: 283 - protein, 11 aa, Artificial Sequence
  Synthetic sequence
RASQSISRWLA

SEQ ID NO: 284 - protein, 7 aa, Artificial Sequence
  Synthetic sequence
GASNLQS

SEQ ID NO: 285 - protein, 246 aa, Artificial Sequence
  Synthetic sequence
EVQLVESGGGLVKPGGSLRLSCAASGFTFSSYWMSWVRQAPGKGLEWVSAIGTGGGTYYAAPVKGRFTISRDDSKNTLYLQMNSLKTEDTAVYYCAREWLVPYYGMDVWGQGTTVTVSSGGGGSGGGGSGGGGSGGGGSDIQMTQSPSSLSASVGDRVTITCRASQSISRWLAWYQQKPGKAPKLLIYGASNLQSGVPSRFSGSGSGTDFTLTISSLQPEDFATYYCQQSYSTPWTFGQGTKVEIK

SEQ ID NO: 286 - protein, 9 aa, Artificial Sequence
  Synthetic sequence
FSVSSNYMS

SEQ ID NO: 287 - protein, 13 aa, Artificial Sequence
  Synthetic sequence
AGISYDGSSKPYA

SEQ ID NO: 288 - protein, 15 aa, Artificial Sequence
  Synthetic sequence
CARSRGIAARPLQHW

SEQ ID NO: 289 - protein, 17 aa, Artificial Sequence
  Synthetic sequence
KSSQSVLYSSNNKNYLA

SEQ ID NO: 290 - protein, 7 aa, Artificial Sequence
  Synthetic sequence
WASTRQS

SEQ ID NO: 291 - protein, 11 aa, Artificial Sequence
  Synthetic sequence
CHQYYGHPPTF

SEQ ID NO: 292 - protein, 253 aa, Artificial Sequence
  Synthetic sequence
EVQLLESGGGLVQPGGSLRLSCAASGFSVSSNYMSWVRQAPGKGLEWVAGISYDGSSKPYADSVKGRFTISRDNSKNTLYLQMNSLRAEDTAVYYCARSRGIAARPLQHWGQGTLVTVSSGGGGSGGGGSGGGGSGGGGSDIVMTQSPDSLAVSLGERATINCKSSQSVLYSSNNKNYLAWYQQKPGQPPKLLIYWASTRQSGVPDRFSGSGSGTDFTLTISSLQAEDVAVYYCHQYYGHPPTFGGGTKVEIK

SEQ ID NO: 293 - protein, 7 aa, Artificial Sequence
  Synthetic sequence
QASTRQS

SEQ ID NO: 294 - protein, 253 aa, Artificial Sequence
  Synthetic sequence
EVQLLESGGGLVQPGGSLRLSCAASGFSVSSNYMSWVRQAPGKGLEWVAGISYDGSSKPYADSVKGRFTISRDNSKNTLYLQMNSLRAEDTAVYYCARSRGIAARPLQHWGQGTLVTVSSGGGGSGGGGSGGGGSGGGGSDIVMTQSPDSLAVSLGERATINCKSSQSVLYSSNNKNYLAWYQQKPGQPPKLLIYQASTRQSGVPDRFSGSGSGTDFTLTISSLQAEDVAVYYCHQYYGHPPTFGGGTKVEIK

SEQ ID NO: 295 - protein, 9 aa, Artificial Sequence
  Synthetic sequence
FSFSDYGMH

SEQ ID NO: 296 - protein, 16 aa, Artificial Sequence
  Synthetic sequence
CARDGGWQPAAILDYW

SEQ ID NO: 297 - protein, 248 aa, Artificial Sequence
  Synthetic sequence
EVQLLESGGGLVQPGGSLRLSCAASGFSFSDYGMHWVRQAPGKGLEWVSAISGSGGSTYYADSVKGRFTISRDNSKNTLYLQMNSLRAEDTAVYYCARDGGWQPAAILDYWGQGTLVTVSSGGGGSGGGGSGGGGSGGGGSDIQMTQSPSSLSASVGDRVTITCRASQGISNNLNWYQQKPGKAPKLLIYDASNLETGVPSRFSGSGSGTDFTLTISSLQPEDFATYYCQQSYSTPLTFGGGTKVEIK

SEQ ID NO: 298 - protein, 9 aa, Artificial Sequence
  Synthetic sequence
FTFSDHGMH

SEQ ID NO: 299 - protein, 12 aa, Artificial Sequence
  Synthetic sequence
SVIYGGESTYYA

SEQ ID NO: 300 - protein, 16 aa, Artificial Sequence
  Synthetic sequence
CARDPAVAGGGIFDYW

SEQ ID NO: 301 - protein, 11 aa, Artificial Sequence
  Synthetic sequence
CQQSYSTCYTF

SEQ ID NO: 302 - protein, 247 aa, Artificial Sequence
  Synthetic sequence
EVQLLESGGGLVQPGGSLRLSCAASGFTFSDHGMHWVRQAPGKGLEWVSVIYGGESTYYADSVKGRFTISRDNSKNTLYLQMNSLRAEDTAVYYCARDPAVAGGGIFDYWGQGTLVTVSSGGGGSGGGGSGGGGSGGGGSDIQMTQSPSSLSASVGDRVTITCRASQGISNYLAWYQQKPGKAPKLLIYDASNLETGVPSRFSGSGSGTDFTLTISSLQPEDFATYYCQQSYSTCYTFGQGTKLEIK

SEQ ID NO: 303 - protein, 9 aa, Artificial Sequence
  Synthetic sequence
DTFTGYYIH

SEQ ID NO: 304 - protein, 13 aa, Artificial Sequence
  Synthetic sequence
GWINPNSGGTNYA

SEQ ID NO: 305 - protein, 17 aa, Artificial Sequence
  Synthetic sequence
CARSGLWLGSYYGMDVW

SEQ ID NO: 306 - protein, 11 aa, Artificial Sequence
  Synthetic sequence
RASQTISIWLA

SEQ ID NO: 307 - protein, 7 aa, Artificial Sequence
  Synthetic sequence
DASTLQS

SEQ ID NO: 308 - protein, 11 aa, Artificial Sequence [sequence omitted]

SEQ ID NO: 309 - protein, 249 aa, Artificial Sequence
  Synthetic sequence
QVQLVQSGAEVKKPGASVKVSCKASGDTFTGYYIHWVRQAPGQGLEWMGWINPNSGGTNYAQKFQGRVTMTRDTSTSTVYMELSSLRSEDTAVYYCARSGLWLGSYYGMDVWGQGTLVTVSSGGGGSGGGGSGGGGSGGGGSDIQMTQSPSSLSASVGDRVTITCRASQTISIWLAWYQQKPGKAPKLLIYDASTLQSGVPSRFSGSGSGTDFTLTISSLQPEDFATYYCQQYSSYPLTFGQGTKVEIK

SEQ ID NO: 310 - protein, 9 aa, Artificial Sequence
  Synthetic sequence
YTFTSYDIN

SEQ ID NO: 311 - protein, 13 aa, Artificial Sequence
  Synthetic sequence
GWINPNSGTTGYA

SEQ ID NO: 312 - protein, 14 aa, Artificial Sequence
  Synthetic sequence
CARSPYYYYGMDVW

SEQ ID NO: 313 - protein, 11 aa, Artificial Sequence
  Synthetic sequence
RASHFISRWVA

SEQ ID NO: 314 - protein, 10 aa, Artificial Sequence
  Synthetic sequence
CQQSYSGISF

SEQ ID NO: 315 - protein, 245 aa, Artificial Sequence
  Synthetic sequence
QVQLVQSGAEVKKPGASVKVSCKASGYTFTSYDINWVRQAPGQGLEWMGWINPNSGTTGYAQKFQGRVTMTRDTSTSTVYMELSSLRSEDTAVYYCARSPYYYYGMDVWGQGTTVTVSSGGGGSGGGGSGGGGSGGGGSDIQMTQSPSSLSASVGDRVTITCRASHFISRWVAWYQQKPGKAPKLLIYAASTLQSGVPSRFSGSGSGTDFTLTISSLQPEDFATYYCQQSYSGISFGPGTKVDIK

SEQ ID NO: 316 - protein, 9 aa, Artificial Sequence
  Synthetic sequence
FTFNNYGMN

SEQ ID NO: 317 - protein, 13 aa, Artificial Sequence
  Synthetic sequence
SRINSDGSSTSYA

SEQ ID NO: 318 - protein, 14 aa, Artificial Sequence [sequence omitted]

SEQ ID NO: 319 - protein, 12 aa, Artificial Sequence
  Synthetic sequence
RASQSVSGSYLA

SEQ ID NO: 320 - protein, 7 aa, Artificial Sequence
  Synthetic sequence
ATSSRAS

SEQ ID NO: 321 - protein, 10 aa, Artificial Sequence
  Synthetic sequence
CQQYYSGLTF

SEQ ID NO: 322 - protein, 246 aa, Artificial Sequence
  Synthetic sequence
EVQLLESGGGLVQPGGSLRLSCAASGFTFNNYGMNWVRQAPGKGLEWVSRINSDGSSTSYADSVKGRFTISRDNSKNTLYLQMNSLRAEDTAVYYCARGAYYYYYMDVWGQGTLVTVSSGGGGSGGGGSGGGGSGGGGSEIVMTQSPATLSVSPGERATLSCRASQSVSGSYLAWYQQKPGQAPRLLIYATSSRASGIPARFSGSGSGTEFTLTISSLQSEDFAVYYCQQYYSGLTFGQGTKVEIK

SEQ ID NO: 323 - protein, 9 aa, Artificial Sequence
  Synthetic sequence
FTFSNSDMN

SEQ ID NO: 324 - protein, 13 aa, Artificial Sequence
  Synthetic sequence
AHIWNDGSQKYYA

SEQ ID NO: 325 - protein, 17 aa, Artificial Sequence
  Synthetic sequence
CARDRTDPGYSSAMDVW

SEQ ID NO: 326 - protein, 11 aa, Artificial Sequence
  Synthetic sequence
RASQDIRNYLG

SEQ ID NO: 327 - protein, 7 aa, Artificial Sequence
  Synthetic sequence
DASSLET

SEQ ID NO: 328 - protein, 11 aa, Artificial Sequence
  Synthetic sequence
CQQATSLPLTF

SEQ ID NO: 329 - protein, 249 aa, Artificial Sequence
  Synthetic sequence
EVQLLESGGGLVQPGGSLRLSCAASGFTFSNSDMNWVRQAPGKGLEWVAHIWNDGSQKYYADSVKGRFTISRDNSKNTLYLQMNSLRAEDTAVYYCARDRTDPGYSSAMDVWGQGTTVTVSSGGGGSGGGGSGGGGSGGGGSDIQMTQSPSSLSASVGDRVTITCRASQDIRNYLGWYQQKPGKAPKLLIYDASSLETGVPSRFSGSGSGTDFTLTISSLQPEDFATYYCQQATSLPLTFGGGTKVEIK

SEQ ID NO: 330 - protein, 15 aa, Artificial Sequence
  Synthetic sequence
CAKDSDYSNLLWDYW

SEQ ID NO: 331 - protein, 11 aa, Artificial Sequence
  Synthetic sequence
RASQDITNDLG

SEQ ID NO: 332 - protein, 7 aa, Artificial Sequence
  Synthetic sequence
QASSLES

SEQ ID NO: 333 - protein, 11 aa, Artificial Sequence [sequence omitted]

SEQ ID NO: 334 - protein, 247 aa, Artificial Sequence
  Synthetic sequence
QVQLVQSGAEVKKPGASVKVSCKASGYTFTSYDINWVRQAPGQGLEWMGWMNPNSGNTGYAQKFQGRVTMTRDTSTSTVYMELSSLRSEDTAVYYCAKDSDYSNLLWDYWGQGTLVTVSSGGGGSGGGGSGGGGSGGGGSDIQMTQSPSSLSASVGDRVTITCRASQDITNDLGWYQQKPGKAPKLLIYQASSLESGVPSRFSGSGSGTDFTLTISSLQPEDFATYYCQQSYTIPLTFGQGTKVEIK

SEQ ID NO: 335 - protein, 13 aa, Artificial Sequence
  Synthetic sequence
AVVSYDGTNKYYA

SEQ ID NO: 336 - protein, 16 aa, Artificial Sequence
  Synthetic sequence
CAKDICSSTSCYFDLW

SEQ ID NO: 337 - protein, 11 aa, Artificial Sequence
  Synthetic sequence
RASQNINNYVN

SEQ ID NO: 338 - protein, 11 aa, Artificial Sequence [sequence omitted]

SEQ ID NO: 339 - protein, 248 aa, Artificial Sequence
  Synthetic sequence
EVQLLESGGGLVQPGGSLRLSCAASGFTFGDYAMSWVRQAPGKGLEWVAVVSYDGTNKYYADSVKGRFTISRDNSKNTLYLQMNSLRAEDTAVYYCAKDICSSTSCYFDLWGRGTLVTVSSGGGGSGGGGSGGGGSGGGGSDIQMTQSPSSLSASVGDRVTITCRASQNINNYVNWYQQKPGKAPKLLIYDASNLETGVPSRFSGSGSGTDFTLTISSLQPEDFATYYCQQANSFPPTFGQGTRLEIK

SEQ ID NO: 340 - protein, 13 aa, Artificial Sequence
  Synthetic sequence
GIIDPSGGSTSYA

SEQ ID NO: 341 - protein, 17 aa, Artificial Sequence
  Synthetic sequence
CAREEWSSGGVGYFDYW

SEQ ID NO: 342 - protein, 11 aa, Artificial Sequence
  Synthetic sequence
RASQGISSYLA

SEQ ID NO: 343 - protein, 7 aa, Artificial Sequence
  Synthetic sequence
ATSSLQT

SEQ ID NO: 344 - protein, 11 aa, Artificial Sequence [sequence omitted]

SEQ ID NO: 345 - protein, 249 aa, Artificial Sequence
  Synthetic sequence
QVQLVQSGAEVKKPGASVKVSCKASGYTFTSYYMHWVRQAPGQGLEWMGIIDPSGGSTSYAQKFQGRVTMTRDTSTSTVYMELSSLRSEDTAVYYCAREEWSSGGVGYFDYWGQGTLVTVSSGGGGSGGGGSGGGGSGGGGSDIQMTQSPSSLSASVGDRVTITCRASQGISSYLAWYQQKPGKAPKLLIYATSSLQTGVPSRFSGSGSGTDFTLTISSLQPEDFATYYCQQTYSIPITFGQGTRLEIK

SEQ ID NO: 346 - protein, 13 aa, Artificial Sequence
  Synthetic sequence
SAISGGGEDTYYA

SEQ ID NO: 347 - protein, 7 aa, Artificial Sequence
  Synthetic sequence
KASSLES

SEQ ID NO: 348 - protein, 11 aa, Artificial Sequence
  Synthetic sequence
CQQANSYPVTF

SEQ ID NO: 349 - protein, 248 aa, Artificial Sequence
  Synthetic sequence
EVQLLESGGGLVQPGGSLRLSCAASGFTFDDYAMHWVRQAPGKGLEWVSAISGGGEDTYYADSVKGRFTISRDNSKNTLYLQMNSLRAEDTAVYYCARDASYGGNYGMDVWGQGTTVTVSSGGGGSGGGGSGGGGSGGGGSDIQMTQSPSSLSASVGDRVTITCQASQDIRNYLNWYQQKPGKAPKLLIYKASSLESGVPSRFSGSGSGTDFTLTISSLQPEDFATYYCQQANSYPVTFGGGTKVEIK

SEQ ID NO: 350 - protein, 19 aa, Artificial Sequence
  Synthetic sequence
CARDSVAGTGGRYYGMDVW

SEQ ID NO: 351 - protein, 11 aa, Artificial Sequence
  Synthetic sequence
RASQGISNYFA

SEQ ID NO: 352 - protein, 7 aa, Artificial Sequence
  Synthetic sequence
AASSLQG

SEQ ID NO: 353 - protein, 11 aa, Artificial Sequence [sequence omitted]

SEQ ID NO: 354 - protein, 251 aa, Artificial Sequence
  Synthetic sequence
QVQLVQSGAEVKKPGASVKVSCKASGYTFTSYYMHWVRQAPGQGLEWMGIINPSGGSTSYAQKFQGRVTMTRDTSTSTVYMELSSLRSEDTAVYYCARDSVAGTGGRYYGMDVWGQGTLVTVSSGGGGSGGGGSGGGGSGGGGSDIQMTQSPSSLSASVGDRVTITCRASQGISNYFAWYQQKPGKAPKLLIYAASSLQGGVPSRFSGSGSGTDFTLTISSLQPEDFATYYCQQSYSLPYTFGQGTKLEIK

SEQ ID NO: 355 - protein, 13 aa, Artificial Sequence
  Synthetic sequence
GIINPSGGNTKYA

SEQ ID NO: 356 - protein, 13 aa, Artificial Sequence
  Synthetic sequence
CTTADYYYYMDVW

SEQ ID NO: 357 - protein, 10 aa, Artificial Sequence
  Synthetic sequence
CQQYYSNADF

SEQ ID NO: 358 - protein, 244 aa, Artificial Sequence
  Synthetic sequence
QVQLVQSGAEVKKPGASVKVSCKASGYTFTGYYMHWVRQAPGQGLEWMGIINPSGGNTKYAQKFQGRVTMTRDTSTSTVYMELSSLRSEDTAVYYCTTADYYYYMDVWGKGTTVTVSSGGGGSGGGGSGGGGSGGGGSDIQMTQSPSSLSASVGDRVTITCRASQGISNYLAWYQQKPGKAPKLLIYAASSLQSGVPSRFSGSGSGTDFTLTISSLQPEDFATYYCQQYYSNADFGQGTKVEIK

SEQ ID NO: 359 - protein, 9 aa, Artificial Sequence
  Synthetic sequence
FTFSDFWMH

SEQ ID NO: 360 - protein, 14 aa, Artificial Sequence [sequence omitted]

SEQ ID NO: 361 - protein, 11 aa, Artificial Sequence
  Synthetic sequence
RASQSVSRSLA

SEQ ID NO: 362 - protein, 5 aa, Artificial Sequence
  Synthetic sequence
SSLQS

SEQ ID NO: 363 - protein, 9 aa, Artificial Sequence
  Synthetic sequence
QQYKSYPVT

SEQ ID NO: 364 - protein, 246 aa, Artificial Sequence
  Synthetic sequence
EVQLLESGGGLVQPGGSLRLSCAASGFTFSDFWMHWVRQAPGKGLEWISYISGDSGYTNYADSVKGRFTISRDNSKNTLYLQMNSLRAEDTAVYYCARDRPYYYYMDVWGKGTTVTVSSGGGGSGGGGSGGGGSGGGGSDIQMTQSPSSLSASVGDRVTITCRASQSVSRSLAWYQQKPGKAPKLLIYAASSLQSGVPSRFSGSGSGTDFTLTISSLQPEDFATYYCQQYKSYPVTFGQGTKVEIK

SEQ ID NO: 365 - protein, 9 aa, Artificial Sequence
  Synthetic sequence
FTFDDYTMH

SEQ ID NO: 366 - protein, 13 aa, Artificial Sequence
  Synthetic sequence
SDISGSGGSTYYA

SEQ ID NO: 367 - protein, 17 aa, Artificial Sequence
  Synthetic sequence
CAKDVVVAGTPLHFDYW

SEQ ID NO: 368 - protein, 5 aa, Artificial Sequence
  Synthetic sequence
SYLQS

SEQ ID NO: 369 - protein, 9 aa, Artificial Sequence
  Synthetic sequence
QQAHNYPIT

SEQ ID NO: 370 - protein, 249 aa, Artificial Sequence
  Synthetic sequence
EVQLLESGGGLVQPGGSLRLSCAASGFTFDDYTMHWVRQAPGKGLEWVSDISGSGGSTYYADSVKGRFTISRDNSKNTLYLQMNSLRAEDTAVYYCAKDVVVAGTPLHFDYWGQGTLVTVSSGGGGSGGGGSGGGGSGGGGSDIQMTQSPSSLSASVGDRVTITCQASQDISNYLNWYQQKPGKAPKLLIYAASYLQSGVPSRFSGSGSGTDFTLTISSLQPEDFATYYCQQAHNYPITFGQGTRLEIK

SEQ ID NO: 371 - protein, 13 aa, Artificial Sequence
  Synthetic sequence
ASISSTSAYIDYA

SEQ ID NO: 372 - protein, 14 aa, Artificial Sequence
  Synthetic sequence
CAREVVGATTFDYW

SEQ ID NO: 373 - protein, 11 aa, Artificial Sequence
  Synthetic sequence
RASQSISTWLA

SEQ ID NO: 374 - protein, 9 aa, Artificial Sequence
  Synthetic sequence
QQANAFPPT

SEQ ID NO: 375 - protein, 246 aa, Artificial Sequence
  Synthetic sequence
EVQLLESGGGLVQPGGSLRLSCAASEFTFSNAWMSWVRQAPGKGLEWVASISSTSAYIDYADSVKGRFTISRDNSKNTLYLQMNSLRAEDTAVYYCAREVVGATTFDYWGQGTLVTVSSGGGGSGGGGSGGGGSGGGGSDIQMTQSPSSLSASVGDRVTITCRASQSISTWLAWYQQKPGKAPKLLIYAASSLQSGVPSRFSGSGSGTDFTLTISSLQPEDFATYYCQQANAFPPTFGQGTRLEIK

SEQ ID NO: 376 - protein, 13 aa, Artificial Sequence
  Synthetic sequence
GWMEPHTGNTRYA

SEQ ID NO: 377 - protein, 12 aa, Artificial Sequence
  Synthetic sequence
CAKGGFSWFDPW

SEQ ID NO: 378 - protein, 5 aa, Artificial Sequence
  Synthetic sequence
STRES

SEQ ID NO: 379 - protein, 9 aa, Artificial Sequence
  Synthetic sequence
QQYYSTPPT

SEQ ID NO: 380 - protein, 250 aa, Artificial Sequence
  Synthetic sequence
QVQLVQSGAEVKKPGSSVKVSCKASGGTFSSYAISWVRQAPGQGLEWMGWMEPHTGNTRYAQKFQGRVTITADESTSTAYMELSSLRSEDTAVYYCAKGGFSWFDPWGQGTLVTVSSGGGGSGGGGSGGGGSGGGGSDIVMTQSPDSLAVSLGERATINCKSSQSVLYSSNNKNYLAWYQQKPGQPPKLLIYWASTRESGVPDRFSGSGSGTDFTLTISSLQAEDVAVYYCQQYYSTPPTFGQGTRLEIK

SEQ ID NO: 381 - protein, 13 aa, Artificial Sequence
  Synthetic sequence
ASITSSSAFIDYA

SEQ ID NO: 382 - protein, 15 aa, Artificial Sequence
  Synthetic sequence
CARERVDWNSYFDLW

SEQ ID NO: 383 - protein, 12 aa, Artificial Sequence
  Synthetic sequence
RASQGISNSYLA

SEQ ID NO: 384 - protein, 5 aa, Artificial Sequence
  Synthetic sequence
STRAT

SEQ ID NO: 385 - protein, 9 aa, Artificial Sequence
  Synthetic sequence
QQYYTYPPT

SEQ ID NO: 386 - protein, 248 aa, Artificial Sequence
  Synthetic sequence
EVQLLESGGGLVKPGGSLRLSCAASGFTFDDYAMHWVRQAPGKGLEWVASITSSSAFIDYAASVKGRFTISRDDSKNTLYLQMNSLKTEDTAVYYCARERVDWNSYFDLWGRGTLVTVSSGGGGSGGGGSGGGGSGGGGSEIVMTQSPATLSVSPGERATLSCRASQGISNSYLAWYQQKPGQAPRLLIYGASTRATGIPARFSGSGSGTEFTLTISSLQSEDFAVYYCQQYYTYPPTFGPGTKVDIK

SEQ ID NO: 387 - protein, 9 aa, Artificial Sequence
  Synthetic sequence
FAFSSHWMH

SEQ ID NO: 388 - protein, 13 aa, Artificial Sequence
  Synthetic sequence
AGTSGSGESRDYA

SEQ ID NO: 389 - protein, 14 aa, Artificial Sequence
  Synthetic sequence
CARETYYYYYMDVW

SEQ ID NO: 390 - protein, 5 aa, Artificial Sequence
  Synthetic sequence
ANLEG

SEQ ID NO: 391 - protein, 9 aa, Artificial Sequence
  Synthetic sequence
QQSDIFPPT

SEQ ID NO: 392 - protein, 246 aa, Artificial Sequence
  Synthetic sequence
EVQLLESGGGLVKPGGSLRLSCAASGFAFSSHWMHWVRQAPGKGLEWVAGTSGSGESRDYADFVKGRFTISRDDSKNTLYLQMNSLKTEDTAVYYCARETYYYYYMDVWGKGTTVTVSSGGGGSGGGGSGGGGSGGGGSDIQMTQSPSSLSASVGDRVTITCRASQGISNYLAWYQQKPGKAPKLLIYDAANLEGGVPSRFSGSGSGTDFTLTISSLQPEDFATYYCQQSDIFPPTFGQGTKVEIK

SEQ ID NO: 393 - protein, 9 aa, Artificial Sequence
  Synthetic sequence
YTFTRHWIH

SEQ ID NO: 394 - protein, 13 aa, Artificial Sequence
  Synthetic sequence
GWINVKTGGAGYA

SEQ ID NO: 395 - protein, 14 aa, Artificial Sequence
  Synthetic sequence
CARESSGWYGTDVW

SEQ ID NO: 396 - protein, 11 aa, Artificial Sequence
  Synthetic sequence
RASQSISNYLA

SEQ ID NO: 397 - protein, 9 aa, Artificial Sequence
  Synthetic sequence
QQSNSFPLT

SEQ ID NO: 398 - protein, 246 aa, Artificial Sequence
  Synthetic sequence
QVQLVQSGAEVKKPGASVKVSCKASGYTFTRHWIHWVRQAPGQGLEWMGWINVKTGGAGYAQKFQGRVTMTRDTSTSTVYMELSSLRSEDTAVYYCARESSGWYGTDVWGQGTTVTVSSGGGGSGGGGSGGGGSGGGGSDIQMTQSPSSLSASVGDRATITCRASQSISNYLAWYQQKPGKAPKLLIYAASSLQSGVPSRFSGSGSGTDFTLTISSLQPEDFATYYCQQSNSFPLTFGGGTKVEIK

SEQ ID NO: 399 - protein, 13 aa, Artificial Sequence
  Synthetic sequence
AAISYDGKYKDYE

SEQ ID NO: 400 - protein, 15 aa, Artificial Sequence
  Synthetic sequence
CARENKQWLASFDYW

SEQ ID NO: 401 - protein, 11 aa, Artificial Sequence
  Synthetic sequence
QASQDISNFVN

SEQ ID NO: 402 - protein, 4 aa, Artificial Sequence
  Synthetic sequence
NLRS

SEQ ID NO: 403 - protein, 9 aa, Artificial Sequence
  Synthetic sequence
QQANSFPVT

SEQ ID NO: 404 - protein, 246 aa, Artificial Sequence
  Synthetic sequence
EVQLLESGGGLVQPGGSLRLSCAASGFTFSSYWMHWVRQAPGKGLEWVAAISYDGKYKDYEDSVKGRFTISRDNSKNTLYLQMNSLRAEDTAVYYCARENKQWLASFDYWGQGTLVTVSSGGGGSGGGGSGGGGSGGGGSDIQMTQSPSSLSASVGDRVTITCQASQDISNFVNWYQQKPGKAPKLLIYAANLRSGVPSRFSGSGSGTDFTLTISSLQPEDFATYYCQQANSFPVTFGPGTKVDIK

SEQ ID NO: 405 - protein, 120 aa, Artificial Sequence
  Synthetic sequence
EVQLLESGGGLVQPGGSLRLSCAASGFTFSSYGMHWVRQAPGKGLEWVAVISDDGSDKYYADSVKGRFTISRDNSKNTLYLQMNSLRAEDTAVYYCTTSKYYYYYGMDVWGQGTTVTVSS

SEQ ID NO: 406 - protein, 107 aa, Artificial Sequence
  Synthetic sequence
DIQMTQSPSSLSASVGDRVTITCQASQDISKSLNWYQQKPGKAPKLLIYAASSLQSGVPSRFSGSGSGTDFTLTISSLQPEDFATYYCQQGYSTPLTFGGGTKVEIK

SEQ ID NO: 407 - protein, 119 aa, Artificial Sequence
  Synthetic sequence
QVQLVQSGAEVKKPGASVKVSCKASGYPFIGYYLHWVRQAPGQGLEWMGIINPSGGSTSYAQKFQGRVTMTRDTSTSTVYMELSSLRSEDTAVYYCAREGRLSYGMDAWGQGTLVTVSS

SEQ ID NO: 408 - protein, 107 aa, Artificial Sequence
  Synthetic sequence
DIQMTQSPSSLSASVGDRVTITCRASQSISSYLAWYQQKPGKAPKLLIYGASTLESGVPSRFSGSGSGTDFTLTISSLQPEDFATYYCQQTWGPPFTFGQGTKLEIK

SEQ ID NO: 409 - protein, 119 aa, Artificial Sequence
  Synthetic sequence
QVQLVQSGAEVKKPGASVKVSCKASGYPFIGQYLHWVRQAPGQGLEWMGIINPSGGSTSYAQKFQGRVTMTRDTSTSTVYMELSSLRSEDTAVYYCAREGRLSYGMDAWGQGTLVTVSS

SEQ ID NO: 410 - protein, 121 aa, Artificial Sequence
  Synthetic sequence
QVQLVQSGAEVKKPGASVKVSCKASGGTFSSYAISWVRQAPGQGLEWMGSINPSGDTTSYAQKFQGRVTMTRDTSTSTVYMELSSLRSEDTAVYYCAKDKAQWLVGYFDYWGQGTLVTVSS

SEQ ID NO: 411 - protein, 107 aa, Artificial Sequence
  Synthetic sequence
DIQMTQSPSSLSASVGDRVTITCQASQDISNSLNWYQQKPGKAPKLLIYAASSLQSGVPSRFSGSGSGTDFTLTISSLQPEDFATYYCQQSYSSVITFGQGTKVEIK

SEQ ID NO: 412 - protein, 118 aa, Artificial Sequence
  Synthetic sequence
EVQLLESGGGLVQPGGSLRLSCAASGFTFSSYWMHWVRQAPGKGLEWVSSISPGGSNIDYADSVKGRFTISRDNSKNTLYLQMNSLRAEDTAVYYCAREVQLSHYDYWGQGTLVTVSS

SEQ ID NO: 413 - protein, 107 aa, Artificial Sequence
  Synthetic sequence
DIQMTQSPSSLSASVGDRVTITCRASQGISNSLAWYQQKPGKAPKLLIYGASSLQSGVPSRFSGSGSGTDFTLTISSLQPEDFATYYCQQANSFPFTFGQGTKVEIK

SEQ ID NO: 414 - protein, 121 aa, Artificial Sequence
  Synthetic sequence
EVQLLESGGGLVQPGGSLRLSCAASGFTFNNYAFHWVRQAPGKGLEWVSRINSYGTSTTYADSVKGRFTISRDNSKNTLYLQMNSLRAEDTAVYYCAREGPVAGYWYFDLWGQGTLVTVSS

SEQ ID NO: 415 - protein, 107 aa, Artificial Sequence
  Synthetic sequence
DIQMTQSPSSLSASVGDRVTITCRASQIIGTNLAWYQQKPGKAPKLLIYGASSLQSGVPSRFSGSGSGTDFTLTISSLQPEDFATYYCQQSYRLPFTFGQGTKVEIK

SEQ ID NO: 416 - protein, 9 aa, Artificial Sequence
  Synthetic sequence
FTFSDYQMS

SEQ ID NO: 417 - protein, 14 aa, Artificial Sequence
  Synthetic sequence
AIISHADGGFKDYA

SEQ ID NO: 418 - protein, 18 aa, Artificial Sequence
  Synthetic sequence
CAKPYSSGWSAVYYFDYW

SEQ ID NO: 419 - protein, 11 aa, Artificial Sequence
  Synthetic sequence
RASRGITNDLG

SEQ ID NO: 420 - protein, 5 aa, Artificial Sequence
  Synthetic sequence
STLQS

SEQ ID NO: 421 - protein, 9 aa, Artificial Sequence
  Synthetic sequence
QQAYSFPWT

SEQ ID NO: 422 - protein, 124 aa, Artificial Sequence
  Synthetic sequence
EVQLLESGGGLVQPGGSLRLSCAASGFTFSDYQMSWVRQAPGKGLEWVAIISHADGGFKDYADSVKGRFTISRDNSKNTLYLQMNSLRAEDTAVYYCAKPYSSGWSAVYYFDYWGQGTLVTVSS

SEQ ID NO: 423 - protein, 107 aa, Artificial Sequence
  Synthetic sequence
DIQMTQSPSSLSASVGDRVTITCRASRGITNDLGWYQQKPGKAPKLLIYAASTLQSGVPSRFSGSGSGTDFTLTISSLQPEDFATYYCQQAYSFPWTFGQGTKVEIK

SEQ ID NO: 424 - protein, 121 aa, Artificial Sequence
  Synthetic sequence
QVQLVQSGAEVKKPGASVKVSCKASGYTFTGYHIHWVRQAPGQGLEWMGIINPSGGSTIYAQKFQGRVTMTRDTSTSTVYMELSSLRSEDTAVYYCAKDWSSWYLGPFDYWGQGTLVTVSS

SEQ ID NO: 425 - protein, 107 aa, Artificial Sequence
  Synthetic sequence
DIQMTQSPSSLSASVGDRVTITCRASQNISSSLNWYQQKPGKAPKLLIYAASSLQSGVPSRFSGSGSGTDFTLTISSLQPEDFATYYCQQSYTTPYTFGQGTKVEIK

SEQ ID NO: 426 - protein, 13 aa, Artificial Sequence
  Synthetic sequence
GIINHSGGSTSYA

SEQ ID NO: 427 - protein, 15 aa, Artificial Sequence
  Synthetic sequence
CARPYSGWYFAFDIW

SEQ ID NO: 428 - protein, 11 aa, Artificial Sequence
  Synthetic sequence
RASQSISSSLN

SEQ ID NO: 429 - protein, 9 aa, Artificial Sequence
  Synthetic sequence
QQSYSTPLT

SEQ ID NO: 430 - protein, 120 aa, Artificial Sequence
  Synthetic sequence
QVQLVQSGAEVKKPGASVKVSCKASGYTFTSYYMHWVRQAPGQGLEWMGIINHSGGSTSYAQKFQGRVTMTRDTSTSTVYMELSSLRSEDTAVYYCARPYSGWYFAFDIWGQGTLVTVSS

SEQ ID NO: 431 - protein, 107 aa, Artificial Sequence
  Synthetic sequence
DIQMTQSPSSLSASVGDRVTITCRASQSISSSLNWYQQKPGKAPKLLIYAASTLQSGVPSRFSGSGSGTDFTLTISSLQPEDFATYYCQQSYSTPLTFGQGTKVEIK

SEQ ID NO: 432 - protein, 121 aa, Artificial Sequence
  Synthetic sequence
EVQLLESGGGLVQPGGSLRLSCAASGFMFGDYAMHWVRQAPGKGLEWVSAISGSGGSTYYADSVKGRFTISRDNSKNTLYLQMNSLRAEDTAVYYCAKDLVVAGIWYFDLWGRGTLVTVSS

SEQ ID NO: 433 - protein, 107 aa, Artificial Sequence
  Synthetic sequence
DIQMTQSPSSLSASVGDRVTITCRASQGISNNLNWYQQKPGKAPKLLIYDASSLESGVPSRFSGSGSGTDFTLTISSLQPEDFATYYCQQTHSFPSTFGQGTKLEIK

SEQ ID NO: 434 - protein, 123 aa, Artificial Sequence
  Synthetic sequence
EVQLLESGGGLVQPGGSLRLSCAASGFTFSDYYMNWVRQAPGKGLEWVSVIGESGGSTYYADSVKGRFTISRDNSKNTLYLQMNSLRAEDTAVYYCAADPVSRWPKHGGGDYWGQGTLVTVSS

SEQ ID NO: 435 - protein, 107 aa, Artificial Sequence
  Synthetic sequence
DIQMTQSPSSLSASVGDRVTITCRASQGISSSLAWYQQKPGKAPKLLIYAASTLQSGVPSRFSGSGSGTDFTLTISSLQPEDFATYYCQQSYSTPWTFGQGTKVEIK

SEQ ID NO: 436 - protein, 118 aa, Artificial Sequence
  Synthetic sequence
QVQLVQSGAEVKKPGASVKVSCKASGYTLTTWYMYWVRQAPGQGLEWMGWINPNRGATNYAQKFQGRVTMTRDTSTSTVYMELSSLRSEDTAVYYCAKGDLWGAMDVWGQGTLVTVSS

SEQ ID NO: 437 - protein, 107 aa, Artificial Sequence
  Synthetic sequence
DIQMTQSPSSLSASVGDRVTITCRASDNIGSWLAWYQQKPGKAPKLLIYAASSLQSGVPSRFSGSGSGTDFTLTISSLQPEDFATYYCQQGYSTPPTFGQGTKVEIK

SEQ ID NO: 438 - protein, 127 aa, Artificial Sequence
  Synthetic sequence
QVQLVQSGAEVKKPGASVKVSCKASGYTFTTYYMHWVRQAPGQGLEWMGGFDPEDGETIYAQKFQGRVTMTRDTSTSTVYMELSSLRSEDTAVYYCARHAVAGAVGAGYYYYGMDVWGQGTMVTVSS

SEQ ID NO: 439 - protein, 107 aa, Artificial Sequence
  Synthetic sequence
DIQMTQSPSSLSASVGDRVTITCRASESISNWLAWYQQKPGKAPKLLIYAASTLQSGVPSRFSGSGSGTDFTLTISSLQPEDFATYYCQQSYSVPFTFGPGTKVDIK

SEQ ID NO: 440 - protein, 13 aa, Artificial Sequence
  Synthetic sequence
GGIIPIVDGVKYA

SEQ ID NO: 441 - protein, 17 aa, Artificial Sequence
  Synthetic sequence
CAKGQFTGNYYYGMDYW

SEQ ID NO: 442 - protein, 5 aa, Artificial Sequence
  Synthetic sequence
SKLEA

SEQ ID NO: 443 - protein, 9 aa, Artificial Sequence
  Synthetic sequence
QQSSEIPYS

SEQ ID NO: 444 - protein, 122 aa, Artificial Sequence
  Synthetic sequence
QVQLVQSGAEVKKPGSSVKVSCKASGYTFTNYYMHWVRQAPGQGLEWMGGIIPIVDGVKYAQKFQGRVTITADESTSTAYMELSSLRSEDTAVYYCAKGQFTGNYYYGMDYWGQGTLVTVSS

SEQ ID NO: 445 - protein, 107 aa, Artificial Sequence
  Synthetic sequence
DIQMTQSPSSLSASVGDRVTITCQANQDISNYLNWYQQKPGKAPKLLIYRASKLEAGVPSRFSGSGSGTDFTLTISSLQPEDFATYYCQQSSEIPYSFGQGTKVEIK

SEQ ID NO: 446 - protein, 119 aa, Artificial Sequence
  Synthetic sequence
QVQLVQSGAEVKKPGASVKVSCKASGYTFTGYYMHWVRQAPGQGLEWMGWIGPNSGDTNYAQKFQGRVTMTRDTSTSTVYMELSSLRSEDTAVYYCARDLDHNWYFDLWGRGTLVTVSS

SEQ ID NO: 447 - protein, 112 aa, Artificial Sequence
  Synthetic sequence
DIVMTQSPLSLPVTPGEPASISCRSSQSLLHSNGYNYLDWYLQKPGQSPQLLIYSSSNRAPGVPDRFSGSGSGTDFTLKISRVEAEDVGVYYCMQALHIPLTFGGGTKVEIK

SEQ ID NO: 448 - protein, 121 aa, Artificial Sequence
  Synthetic sequence
EVQLLESGGGLVQPGGSLRLSCAASGFTFDDYAMHWVRQAPGKGLEWVSYIDASGTTIYYADSVKGRFTISRDNSKNTLYLQMNSLRAEDTAVYYCAKDQAAAGYWYFDLWGRGTLVTVSS

SEQ ID NO: 449 - protein, 107 aa, Artificial Sequence
  Synthetic sequence
DIQMTQSPSSLSASVGDRVTITCQASQDISNYLNWYQQKPGKAPKLLIYKASTLESGVPSRFSGSGSGTDFTLTISSLQPEDFATYYCQQSYSTPITFGQGTRLEIK

SEQ ID NO: 450 - protein, 120 aa, Artificial Sequence
  Synthetic sequence
QVQLVQSGAEVKKPGSSVKVSCKASGYTFTDYHIHWVRQAPGQGLEWMGGIVPRSGSTTYAQKFQGRVTITADESTSTAYMELSSLRSEDTAVYYCAKDESSGWYYFDYWGQGTLVTVSS

SEQ ID NO: 451 - protein, 112 aa, Artificial Sequence
  Synthetic sequence
DIVMTQSPLSLPVTPGEPASISCRSSQSLLHSNGYNYLDWYLQKPGQSPQLLIYSAYNRASGVPDRFSGSGSGTDFTLKISRVEAEDVGVYYCMQALQTPLTFGQGTKVEIK

SEQ ID NO: 452 - protein, 122 aa, Artificial Sequence
  Synthetic sequence
QVQLVQSGAEVKKPGSSVKVSCKASGYTFTNYYMHWVRQAPGQGLEWMGGIIPIVDRVKYAQKFQGRVTITADESTSTAYMELSSLRSEDTAVYYCAKGRYTVNYYYGMDVWGQGTTVTVSS

SEQ ID NO: 453 - protein, 107 aa, Artificial Sequence
  Synthetic sequence
DIQMTQSPSSLSASVGDRVTITCQANQDISNYLNWYQQKPGKAPKLLIYRASKLEAGVPSRFSGSGSGTDFTLTISSLQPEDFATYYCQQSSEIPYSFGQGTKLEIK

SEQ ID NO: 454 - protein, 121 aa, Artificial Sequence
  Synthetic sequence
EVQLLESGGGLVQPGGSLRLSCAASGFTFEDYAMHWVRQAPGKGLEWVSYLNSDGGSTSYADSVKGRFTISRDNSKNTLYLQMNSLRAEDTAVYYCAKDYCTNGVCAFDYWGQGTLVTVSS

SEQ ID NO: 455 - protein, 107 aa, Artificial Sequence
  Synthetic sequence
DIQMTQSPSSLSASVGDRVTITCRASQSISTYLNWYQQKPGKAPKLLIYDASNLETGVPSRFSGSGSGTDFTLTISSLQPEDFATYYCQQSYTIPITFGQGTRLEIK

SEQ ID NO: 456 - protein, 121 aa, Artificial Sequence
  Synthetic sequence
EVQLLESGGGLVQPGGSLRLSCAASGFTFSDSAMHWVRQAPGKGLEWVSAISGSGSTIYYADSVKGRFTISRDNSKNTLYLQMNSLRAEDTAVYYCVSDIAVAGHWYFDLWGRGTLVTVSS

SEQ ID NO: 457 - protein, 107 aa, Artificial Sequence
  Synthetic sequence
DIQMTQSPSSLSASVGDRVTITCRASQSISTFLNWYQQKPGKAPKLLIYAASRLEGGVPSRFSGSGSGTDFTLTISSLQPEDFATYYCQQANSFPLTFGPGTKVDIK

SEQ ID NO: 458 - protein, 122 aa, Artificial Sequence
  Synthetic sequence
EVQLVESGGGLVKPGGSLRLSCAASGFTFSSYWMSWVRQAPGKGLEWVSYISGDSGYTNYAAPVKGRFTISRDDSKNTLYLQMNSLKTEDTAVYYCARANSSGWYDWYFDLWGRGTLVTVSS

SEQ ID NO: 459 - protein, 107 aa, Artificial Sequence [sequence omitted]

SEQ ID NO: 460 - protein, 123 aa, Artificial Sequence
  Synthetic sequence
EVQLLESGGGLVQPGGSLRLSCAASGFTFDDYAMHWVRQAPGKGLEWVSGISWNSGSIGYADSVKGRFTISRDNSKNTLYLQMNSLRAEDTAVYYCAKDIVAAGHYYYGMDVWGQGTTVTVSS

SEQ ID NO: 461 - protein, 107 aa, Artificial Sequence
  Synthetic sequence
DIQMTQSPSSLSASVGDRVTITCQASQDISNYLNWYQQKPGKAPKLLIYDASNLETGVPSRFSGSGSGTDFTLTISSLQPEDFATYYCQQSYSTPLTFGGGTKVEIK

SEQ ID NO: 462 - protein, 121 aa, Artificial Sequence
  Synthetic sequence
EVQLLESGGGLVQPGGSLRLSCAASGFTFDDYAMHWVRQAPGKGLEWVSYIDTSSSHLYYADSVKGRFTISRDNSKNTLYLQMNSLRAEDTAVYYCARDEAAAGYYGMDVWGQGTTVTVSS

SEQ ID NO: 463 - protein, 107 aa, Artificial Sequence
  Synthetic sequence
DIQMTQSPSSLSASVGDRVTITCQAGQDISNYLNWYQQKPGKAPKLLIYDASNLETGVPSRFSGSGSGTDFTLTISSLQPEDFATYYCQQTYSTPITFGQGTKLEIK

SEQ ID NO: 464 - protein, 13 aa, Artificial Sequence
  Synthetic sequence
SRISSDGRITTYA

SEQ ID NO: 465 - protein, 18 aa, Artificial Sequence
  Synthetic sequence
CARGTSYCTGGVCDIDYW

SEQ ID NO: 466 - protein, 11 aa, Artificial Sequence
  Synthetic sequence
RASQSIGRNLN

SEQ ID NO: 467 - protein, 5 aa, Artificial Sequence
  Synthetic sequence
SNLQS

SEQ ID NO: 468 - protein, 9 aa, Artificial Sequence
  Synthetic sequence
QQSYSIPLT

SEQ ID NO: 469 - protein, 123 aa, Artificial Sequence
  Synthetic sequence
EVQLVESGGGLVKPGGSLRLSCAASGFTFSSYWMSWVRQAPGKGLEWVSRISSDGRITTYAAPVKGRFTISRDDSKNTLYLQMNSLKTEDTAVYYCARGTSYCTGGVCDIDYWGQGTLVTVSS

SEQ ID NO: 470 - protein, 107 aa, Artificial Sequence
  Synthetic sequence
DIQMTQSPSSLSASVGDRVTITCRASQSIGRNLNWYQQKPGKAPKLLIYSASNLQSGVPSRFSGSGSGTDFTLTISSLQPEDFATYYCQQSYSIPLTFGPGTKVDIK

SEQ ID NO: 471 - protein, 120 aa, Artificial Sequence
  Synthetic sequence
EVQLLESGGGLVQPGGSLRLSCAASGFTFSNAWMSWVRQAPGKGLEWVSTIVGNGGATYYADSVKGRFTISRDNSKNTLYLQMNSLRAEDTAVYYCARDNPLRWQGMDVWGQGTLVTVSS

SEQ ID NO: 472 - protein, 107 aa, Artificial Sequence
  Synthetic sequence
DIQMTQSPSSLSASVGDRVTITCRASQDISNYLNWYQQKPGKAPKLLIYAASSLQSGVPSRFSGSGSGTDFTLTISSLQPEDFATYYCQQSYSIPPTFGPGTKVDIK

SEQ ID NO: 473 - protein, 9 aa, Artificial Sequence
  Synthetic sequence
FTFSSYAMS

SEQ ID NO: 474 - protein, 5 aa, Artificial Sequence
  Synthetic sequence
SGLQS

SEQ ID NO: 475 - protein, 122 aa, Artificial Sequence
  Synthetic sequence
EVQLLESGGGLVQPGGSLRLSCAASGFTFSSYAMSWVRQAPGKGLEWVSYISSSSTYTNYADSVKGRFTISRDNSKNTLYLQMNSLRAEDTAVYYCARANSSSWYDWYFDLWGQGTLVTVSS

SEQ ID NO: 476 - protein, 107 aa, Artificial Sequence
  Synthetic sequence
DIQMTQSPSSLSASVGDRVTITCRASQSISSYLNWYQQKPGKAPKLLIYAASGLQSGVPSRFSGSGSGTDFTLTISSLQPEDFATYYCQQSYSTPLTFGGGTKVEIK

SEQ ID NO: 477 - protein, 122 aa, Artificial Sequence
  Synthetic sequence
EVQLLESGGGLVQPGGSLRLSCAASGFTFSSYQMSWVRQAPGKGLEWVSYISSSSTYTNYADSVKGRFTISRDNSKNTLYLQMNSLRAEDTAVYYCARANSSSWYDWYFDLWGQGTLVTVSS

SEQ ID NO: 478 - protein, 123 aa, Artificial Sequence
  Synthetic sequence
EVQLLESGGGLVQPGGSLRLSCAASGFTFSSYAMHWVRQAPGKGLEWVSGISGSGGSAYYADSVKGRFTISRDNSKNTLYLQMNSLRAEDTAVYYCATSQAPVDYYYYGMDVWGQGTTVTVSS

SEQ ID NO: 479 - protein, 107 aa, Artificial Sequence
  Synthetic sequence
DIQMTQSPSSLSASVGDRVTITCRASQSISSWLAWYQQKPGKAPKLLIYAASNLQRGVPSRFSGSGSGTDFTLTISSLQPEDFATYYCQQSYSIPITFGQGTKVEIK

SEQ ID NO: 480 - protein, 122 aa, Artificial Sequence
  Synthetic sequence
EVQLVESGGGLVKPGGSLRLSCAASGFTFSSYWMSWVRQAPGKGLEWVSYISGSSSYTNYAAPVKGRFTISRDDSKNTLYLQMNSLKTEDTAVYYCARVGSSGWYDWYFDLWGRGTLVTVSS

SEQ ID NO: 481 - protein, 107 aa, Artificial Sequence [sequence omitted]

SEQ ID NO: 482 - protein, 118 aa, Artificial Sequence
  Synthetic sequence
QVQLVQSGAEVKKPGASVKVSCKASGYTLTTWYMYWVRQAPGQGLEWMGWINPNRGATNYAQKFQGRVTMTRDTSTSTVYMELSSLRSEDTAVYYCAKGDLWGAMDVWGQGTTVTVSS

SEQ ID NO: 483 - protein, 129 aa, Artificial Sequence
  Synthetic sequence
QVQLVQSGAEVKKPGASVKVSCKASGYTFTGYYIHWVRQAPGQGLEWMGWMNPNSGNTGYAQKFQGRVTMTRDTSTSTVYMELSSLRSEDTAVYYCARDPGFLGYCSGGSCYDGWFDPWGQGTLVTVSS

SEQ ID NO: 484 - protein, 107 aa, Artificial Sequence
  Synthetic sequence
DIQMTQSPSSLSASVGDRVTITCRASQSISSYLHWYQQKPGKAPKLLIYAASSLQSGVPSRFSGSGSGTDFTLTISSLQPEDFATYYCQQSYTAPYTFGQGTKLEIK

SEQ ID NO: 485 - protein, 24 aa, Artificial Sequence
  Synthetic sequence
CARDPGFLGYSSGGSCYDGWFDPW

SEQ ID NO: 486 - protein, 129 aa, Artificial Sequence
  Synthetic sequence
QVQLVQSGAEVKKPGASVKVSCKASGYTFTGYYIHWVRQAPGQGLEWMGWMNPNSGNTGYAQKFQGRVTMTRDTSTSTVYMELSSLRSEDTAVYYCARDPGFLGYSSGGSSYDGWFDPWGQGTLVTVSS

SEQ ID NO: 487 - protein, 9 aa, Artificial Sequence
  Synthetic sequence
FTFDDYALH

SEQ ID NO: 488 - protein, 13 aa, Artificial Sequence
  Synthetic sequence
SAISGDGRSTTYA

SEQ ID NO: 489 - protein, 17 aa, Artificial Sequence
  Synthetic sequence
CARDGTVNGATGWFDPW

SEQ ID NO: 490 - protein, 11 aa, Artificial Sequence
  Synthetic sequence
QASQDISKYLN

SEQ ID NO: 491 - protein, 5 aa, Artificial Sequence
  Synthetic sequence
SNLET

SEQ ID NO: 492 - protein, 9 aa, Artificial Sequence
  Synthetic sequence
QQSYSIPFT

SEQ ID NO: 493 - protein, 122 aa, Artificial Sequence
  Synthetic sequence
EVQLLESGGGLVQPGGSLRLSCAASGFTFDDYALHWVRQAPGKGLEWVSAISGDGRSTTYADSVKGRFTISRDNSKNTLYLQMNSLRAEDTAVYYCARDGTVNGATGWFDPWGQGTLVTVSS

SEQ ID NO: 494 - protein, 107 aa, Artificial Sequence
  Synthetic sequence
DIQMTQSPSSLSASVGDRVTITCQASQDISKYLNWYQQKPGKAPKLLIYDASNLETGVPSRFSGSGSGTDFTLTISSLQPEDFATYYCQQSYSIPFTFGPGTKVDIK

SEQ ID NO: 495 - protein, 9 aa, Artificial Sequence
  Synthetic sequence
FTFSDYGMP

SEQ ID NO: 496 - protein, 121 aa, Artificial Sequence
  Synthetic sequence
EVQLLESGGGLVQPGGSLRLSCAASGFTFSDYGMPWVRQAPGKGLEWVSAISGSGGSTYYADSVKGRFTISRDNSKNTLYLQMNSLRAEDTAVYYCARDGGWQPAAILDYWGQGTLVTVSS

SEQ ID NO: 497 - protein, 107 aa, Artificial Sequence
  Synthetic sequence
DIQMTQSPSSLSASVGDRVTITCRASQGISNNLNWYQQKPGKAPKLLIYDASNLETGVPSRFSGSGSGTDFTLTISSLQPEDFATYYCQQSYSTPLTFGQGTKVEIK

SEQ ID NO: 498 - protein, 118 aa, Artificial Sequence
  Synthetic sequence
QVQLVQSGAEVKKPGASVKVSCKASGYTFTDYFLHWVRQAPGQGLEWMGWMNPTSGNTGYAQKFQGRVTMTRDTSTSTVYMELSSLRSEDTAVYYCAREGEGSGFDYWGQGTLVTVSS

SEQ ID NO: 499 - protein, 107 aa, Artificial Sequence
  Synthetic sequence
DIQMTQSPSSLSASVGDRVTITCRASQGINSWLAWYQQKPGKAPKLLIYDASNLETGVPSRFSGSGSGTDFTLTISSLQPEDFATYYCQQSYSTPLTFGGGTKVEIK

SEQ ID NO: 500 - protein, 120 aa, Artificial Sequence
  Synthetic sequence
QVQLVQSGAEVKKPGASVKVSCKASGYTFTSYYMHWVRQAPGQGLEWMAWMNPNSGNTGYAQKFQGRVTMTRDTSTSTVYMELSSLRSEDTAVYYCARDYDFWSGSLGYWGQGTLVTVSS

SEQ ID NO: 501 - protein, 107 aa, Artificial Sequence
  Synthetic sequence
DIQMTQSPSSLSASVGDRVTITCRASQGISNYLAWYQQKPGKAPKLLIYAASSLQSGVPSRFSGSGSGTDFTLTISSLQPEDFATYYCQQSYSTPWTFGQGTKVEIK

SEQ ID NO: 502 - protein, 125 aa, Artificial Sequence
  Synthetic sequence
QVQLVQSGAEVKKPGASVKVSCKASGYTFTSYYMHWVRQAPGQGLEWMGIINPSGGSTSYAQKFQGRVTMTRDTSTSTVYMELSSLRSEDTAVYYCARDTGYSYGRYYYYGMDVWGQGTLVTVSS

SEQ ID NO: 503 - protein, 107 aa, Artificial Sequence
  Synthetic sequence
DIQMTQSPSSLSASVGDRVTITCRASQSIGRWLAWYQQKPGKAPKLLIYDASNLQSGVPSRFSGSGSGTDFTLTISSLQPEDFATYYCQQSYSIPITFGQGTKVEIK

SEQ ID NO: 504 - protein, 121 aa, Artificial Sequence
  Synthetic sequence
QVQLVQSGAEVKKPGASVKVSCKASGYTLTDYYMHWVRQAPGQGLEWMGIINPSGGSTSYAQKFQGRVTMTRDTSTSTVYMELSSLRSEDTAVYYCAREEYSSSSGYFDYWGQGTLVTVSS

SEQ ID NO: 505 - protein, 107 aa, Artificial Sequence
  Synthetic sequence
DIQMTQSPSSLSASVGDRVTITCRASQGISSWLAWYQQKPGKAPKLLIYAASSLQSGVPSRFSGSGSGTDFTLTISSLQPEDFATYYCQQSYSTPLTFGQGTKVEIK

SEQ ID NO: 506 - protein, 120 aa, Artificial Sequence
  Synthetic sequence
QVQLVQSGAEVKKPGASVKVSCKASGYTFTSYGISWVRQAPGQGLEWMGWMHPKSGDTGLTQKFQGRVTMTRDTSTSTVYMELSSLRSEDTAVYYCARDTPYYYYGMDVWGQGTTVTVSS

SEQ ID NO: 507 - protein, 107 aa, Artificial Sequence
  Synthetic sequence
DIQMTQSPSSLSASVGDRVTITCRASQSISSWLAWYQQKPGKAPKLLIYAASSLQSGVPSRFSGSGSGTDFTLTISSLQPEDFATYYCQQSYSVPITFGQGTKVEIK

SEQ ID NO: 508 - protein, 14 aa, Artificial Sequence
  Synthetic sequence
CAKERFIDYGMDVW

SEQ ID NO: 509 - protein, 8 aa, Artificial Sequence
  Synthetic sequence
QQTYSGWT

SEQ ID NO: 510 - protein, 119 aa, Artificial Sequence
  Synthetic sequence
EVQLLESGGGLVQPGGSLRLSCAASGFTFSSYAMSWVRQAPGKGLEWVSAISGSGGSTYYADSVKGRFTISRDNSKNTLYLQMNSLRAEDTAVYYCAKERFIDYGMDVWGQGTTVTVSS

SEQ ID NO: 511 - protein, 106 aa, Artificial Sequence
  Synthetic sequence
DIQMTQSPSSLSASVGDRVTITCQASQDISNYLNWYQQKPGKAPKLLIYAASSLQSGVPSRFSGSGSGTDFTLTISSLQPEDFATYYCQQTYSGWTFGPGTKVDIK

SEQ ID NO: 512 - protein, 121 aa, Artificial Sequence
  Synthetic sequence
EVQLVESGGGLVKPGGSLRLSCAASGFTFGDYAMSWVRQAPGKGLEWVSYISGDIGYTNYAAPVKGRFTISRDDSKNTLYLQMNSLKTEDTAVYYCARDVAATGNWYFDLWGRGTLVTVSS

SEQ ID NO: 513 - protein, 123 aa, Artificial Sequence
  Synthetic sequence
EVQLLESGGGLVQPGGSLRLSCAASGFSFSSYTMNWVRQAPGKGLEWVSFITSSSRTIYYADSVKGRFTISRDNSKNTLYLQMNSLRAEDTAVYYCARDRRGDYGDSWYFDLWGRGTLVTVSS

SEQ ID NO: 514 - protein, 107 aa, Artificial Sequence
  Synthetic sequence
EIVMTQSPATLSVSPGERATLSCRASQSVRNYLAWYQQKPGQAPRLLIYGASTRATGIPARFSGSGSGTEFTLTISSLQSEDFAVYYCQQYGSSPLTFGGGTKVEIK

SEQ ID NO: 515 - protein, 121 aa, Artificial Sequence
  Synthetic sequence
QVQLVQSGAEVKKPGASVKVSCKASGYTFSKHFVHWVRQAPGQGLEWMGWMNPNSGNSGYAQKFQGRVTMTRDTSTSTVYMELSSLRSEDTAVYYCARGEGGYYYYGMDVWGQGTLVTVSS

SEQ ID NO: 516 - protein, 107 aa, Artificial Sequence
  Synthetic sequence
DIQMTQSPSSLSASVGDRVTITCRASQSISSWLAWYQQKPGKAPKLLIYAASTLQSGVPSRFSGSGSGTDFTLTISSLQPEDFATYYCQQSYSTPWTFGQGTKVEIK

SEQ ID NO: 517 - protein, 120 aa, Artificial Sequence
  Synthetic sequence
EVQLLESGGGLVQPGGSLRLSCAASGFTFGSYSMSWVRQAPGKGLEWVSAIGTGGGTYYADSVKGRFTISRDNSKNTLYLQMNSLRAEDTAVYYCAKGTPYYYYYGMDVWGQGTMVTVSS

SEQ ID NO: 518 - protein, 107 aa, Artificial Sequence
  Synthetic sequence
DIQMTQSPSSLSASVGDRVTITCRASQPLSNWLAWYQQKPGKAPKLLIYAASSLQSGVPSRFSGSGSGTDFTLTISSLQPEDFATYYCQQAISFPLTFGGGTKVEIK

SEQ ID NO: 519 - protein, 125 aa, Artificial Sequence
  Synthetic sequence
QVQLVQSGAEVKKPGASVKVSCKASGYTFTSYYMHWVRQAPGQGLEWMGWMNPNSGNTGYAQKFQGRVTMTRDTSTSTVYMELSSLRSEDTAVYYCARDLGYYDSSGYFGAFDIWGQGTTVTVSS

SEQ ID NO: 520 - protein, 107 aa, Artificial Sequence
  Synthetic sequence
DIQMTQSPSSLSASVGDRVTITCQSSEDISSSLNWYQQKPGKAPKLLIYAASSLQIGVPSRFSGSGSGTDFTLTISSLQPEDFATYYCQQTYSTPYTFGQGTKVEIK

SEQ ID NO: 521 - protein, 122 aa, Artificial Sequence
  Synthetic sequence
QVQLVQSGAEVKKPGASVKVSCKASGYTFTSYGISWVRQAPGQGLEWMGIINPRGGSTIFAQKFQGRVTMTRDTSTSTVYMELSSLRSEDTAVYYCARGTRSSGWYGWFDPWGQGTLVTVSS

SEQ ID NO: 522 - protein, 107 aa, Artificial Sequence
  Synthetic sequence
DIQMTQSPSSLSASVGDRVTITCRASQGIGNWLAWYQQKPGKAPKLLIYAASNLETGVPSRFSGSGSGTDFTLTISSLQPEDFATYYCQQIHSYPLTFGGGTKVEIK

SEQ ID NO: 523 - protein, 120 aa, Artificial Sequence
  Synthetic sequence
EVQLVESGGGLVKPGGSLRLSCAASGFIFQDSAIHWVRQAPGKGLEWVSAIGTGGGTYYAAPVKGRFTISRDDSKNTLYLQMNSLKTEDTAVYYCARSYCSGGSCSLGSWGQGTLVTVSS

SEQ ID NO: 524 - protein, 112 aa, Artificial Sequence
  Synthetic sequence
DIVMTQSPLSLPVTPGEPASISCRSSQSLLHSNGYNYLDWYLQKPGQSPQLLIYDASNLETGVPDRFSGSGSGTDFTLKISRVEAEDVGVYYCMQALQTPLTFGQGTKVEIK

SEQ ID NO: 525 - protein, 121 aa, Artificial Sequence
  Synthetic sequence
EVQLLESGGGLVQPGGSLRLSCAASGFTFDDYGMSWVRQAPGKGLEWVSYISSSSSYIYYADSVKGRFTISRDNSKNTLYLQMNSLRAEDTAVYYCAREIAAAGFYGMDVWGQGTTVTVSS

SEQ ID NO: 526 - protein, 23 aa, Artificial Sequence
  Synthetic sequence
CAREGLGYCTNGVCWNYYGMDVW

SEQ ID NO: 527 - protein, 9 aa, Artificial Sequence
  Synthetic sequence
QQSYSTPYT

SEQ ID NO: 528 - protein, 128 aa, Artificial Sequence
  Synthetic sequence
QVQLVQSGAEVKKPGASVKVSCKASGYTFTSYYMHWVRQAPGQGLEWMGWMNPNSGNTGYAQKFQGRVTMTRDTSTSTVYMELSSLRSEDTAVYYCAREGLGYCTNGVCWNYYGMDVWGQGTLVTVSS

SEQ ID NO: 529 - protein, 107 aa, Artificial Sequence
  Synthetic sequence
DIQMTQSPSSLSASVGDRVTITCRASQGISSWLAWYQQKPGKAPKLLIYGASSLQSGVPSRFSGSGSGTDFTLTISSLQPEDFATYYCQQSYSTPYTFGQGTKVEIK

SEQ ID NO: 530 - protein, 126 aa, Artificial Sequence
  Synthetic sequence
QVQLVQSGAEVKKPGSSVKVSCKASGGTLSRYGVSWVRQAPGQGLEWMGGIIPIFGTTNYAQKFQGRVTITADESTSTAYMELSSLRSEDTAVYYCARDRVYYDSSGYPTWYFDLWGRGTLVTVSS

SEQ ID NO: 531 - protein, 108 aa, Artificial Sequence
  Synthetic sequence
EIVMTQSPATLSVSPGERATLSCRASQSVSSSYLAWYQQKPGQAPRLLIYGASTRATGIPARFSGSGSGTEFTLTISSLQSEDFAVYYCQQYGSSPITFGQGTKVEIK

SEQ ID NO: 532 - protein, 121 aa, Artificial Sequence
  Synthetic sequence
EVQLLESGGGLVQPGGSLRLSCAASGFTFDDFAMHWVRQAPGKGLEWVSGISGNGDSRYYADSVKGRFTISRDNSKNTLYLQMNSLRAEDTAVYYCARDASYGGNYGMDVWGQGTTVTVSS

SEQ ID NO: 533 - protein, 107 aa, Artificial Sequence
  Synthetic sequence
DIQMTQSPSSLSASVGDRVTITCQASQDIRNYLNWYQQKPGKAPKLLIYKASTLESGVPSRFSGSGSGTDFTLTISSLQPEDFATYYCQQANSFPLTFGPGTKVDIK

SEQ ID NO: 534 - protein, 119 aa, Artificial Sequence
  Synthetic sequence
EVQLVESGGGLVKPGGSLRLSCAASGFTFSSYWMSWVRQAPGKGLEWVSAIGTGGGTYYAAPVKGRFTISRDDSKNTLYLQMNSLKTEDTAVYYCAREWLVPYYGMDVWGQGTTVTVSS

SEQ ID NO: 535 - protein, 107 aa, Artificial Sequence
  Synthetic sequence
DIQMTQSPSSLSASVGDRVTITCRASQSISRWLAWYQQKPGKAPKLLIYGASNLQSGVPSRFSGSGSGTDFTLTISSLQPEDFATYYCQQSYSTPWTFGQGTKVEIK

SEQ ID NO: 536 - protein, 120 aa, Artificial Sequence
  Synthetic sequence
EVQLLESGGGLVQPGGSLRLSCAASGFSVSSNYMSWVRQAPGKGLEWVAGISYDGSSKPYADSVKGRFTISRDNSKNTLYLQMNSLRAEDTAVYYCARSRGIAARPLQHWGQGTLVTVSS

SEQ ID NO: 537 - protein, 113 aa, Artificial Sequence
  Synthetic sequence
DIVMTQSPDSLAVSLGERATINCKSSQSVLYSSNNKNYLAWYQQKPGQPPKLLIYWASTRQSGVPDRFSGSGSGTDFTLTISSLQAEDVAVYYCHQYYGHPPTFGGGTKVEIK

SEQ ID NO: 538 - protein, 113 aa, Artificial Sequence
  Synthetic sequence
DIVMTQSPDSLAVSLGERATINCKSSQSVLYSSNNKNYLAWYQQKPGQPPKLLIYQASTRQSGVPDRFSGSGSGTDFTLTISSLQAEDVAVYYCHQYYGHPPTFGGGTKVEIK

SEQ ID NO: 539 - protein, 121 aa, Artificial Sequence
  Synthetic sequence
EVQLLESGGGLVQPGGSLRLSCAASGFSFSDYGMHWVRQAPGKGLEWVSAISGSGGSTYYADSVKGRFTISRDNSKNTLYLQMNSLRAEDTAVYYCARDGGWQPAAILDYWGQGTLVTVSS

SEQ ID NO: 540 - protein, 107 aa, Artificial Sequence
  Synthetic sequence
DIQMTQSPSSLSASVGDRVTITCRASQGISNNLNWYQQKPGKAPKLLIYDASNLETGVPSRFSGSGSGTDFTLTISSLQPEDFATYYCQQSYSTPLTFGGGTKVEIK

SEQ ID NO: 541 - protein, 120 aa, Artificial Sequence
  Synthetic sequence
EVQLLESGGGLVQPGGSLRLSCAASGFTFSDHGMHWVRQAPGKGLEWVSVIYGGESTYYADSVKGRFTISRDNSKNTLYLQMNSLRAEDTAVYYCARDPAVAGGGIFDYWGQGTLVTVSS

SEQ ID NO: 542 - protein, 107 aa, Artificial Sequence
  Synthetic sequence
DIQMTQSPSSLSASVGDRVTITCRASQGISNYLAWYQQKPGKAPKLLIYDASNLETGVPSRFSGSGSGTDFTLTISSLQPEDFATYYCQQSYSTCYTFGQGTKLEIK

SEQ ID NO: 543 - protein, 122 aa, Artificial Sequence
  Synthetic sequence
QVQLVQSGAEVKKPGASVKVSCKASGDTFTGYYIHWVRQAPGQGLEWMGWINPNSGGTNYAQKFQGRVTMTRDTSTSTVYMELSSLRSEDTAVYYCARSGLWLGSYYGMDVWGQGTLVTVSS

SEQ ID NO: 544 - protein, 107 aa, Artificial Sequence
  Synthetic sequence
DIQMTQSPSSLSASVGDRVTITCRASQTISIWLAWYQQKPGKAPKLLIYDASTLQSGVPSRFSGSGSGTDFTLTISSLQPEDFATYYCQQYSSYPLTFGQGTKVEIK

SEQ ID NO: 545 - protein, 119 aa, Artificial Sequence
  Synthetic sequence
QVQLVQSGAEVKKPGASVKVSCKASGYTFTSYDINWVRQAPGQGLEWMGWINPNSGTTGYAQKFQGRVTMTRDTSTSTVYMELSSLRSEDTAVYYCARSPYYYYGMDVWGQGTTVTVSS

SEQ ID NO: 546 - protein, 106 aa, Artificial Sequence
  Synthetic sequence
DIQMTQSPSSLSASVGDRVTITCRASHFISRWVAWYQQKPGKAPKLLIYAASTLQSGVPSRFSGSGSGTDFTLTISSLQPEDFATYYCQQSYSGISFGPGTKVDIK

SEQ ID NO: 547 - protein, 119 aa, Artificial Sequence
  Synthetic sequence
EVQLLESGGGLVQPGGSLRLSCAASGFTFNNYGMNWVRQAPGKGLEWVSRINSDGSSTSYADSVKGRFTISRDNSKNTLYLQMNSLRAEDTAVYYCARGAYYYYYMDVWGQGTLVTVSS

SEQ ID NO: 548 - protein, 107 aa, Artificial Sequence
  Synthetic sequence
EIVMTQSPATLSVSPGERATLSCRASQSVSGSYLAWYQQKPGQAPRLLIYATSSRASGIPARFSGSGSGTEFTLTISSLQSEDFAVYYCQQYYSGLTFGQGTKVEIK

SEQ ID NO: 549 - protein, 122 aa, Artificial Sequence
  Synthetic sequence
EVQLLESGGGLVQPGGSLRLSCAASGFTFSNSDMNWVRQAPGKGLEWVAHIWNDGSQKYYADSVKGRFTISRDNSKNTLYLQMNSLRAEDTAVYYCARDRTDPGYSSAMDVWGQGTTVTVSS

SEQ ID NO: 550 - protein, 107 aa, Artificial Sequence
  Synthetic sequence
DIQMTQSPSSLSASVGDRVTITCRASQDIRNYLGWYQQKPGKAPKLLIYDASSLETGVPSRFSGSGSGTDFTLTISSLQPEDFATYYCQQATSLPLTFGGGTKVEIK

SEQ ID NO: 551 - protein, 120 aa, Artificial Sequence
  Synthetic sequence
QVQLVQSGAEVKKPGASVKVSCKASGYTFTSYDINWVRQAPGQGLEWMGWMNPNSGNTGYAQKFQGRVTMTRDTSTSTVYMELSSLRSEDTAVYYCAKDSDYSNLLWDYWGQGTLVTVSS

SEQ ID NO: 552 - protein, 107 aa, Artificial Sequence
  Synthetic sequence
DIQMTQSPSSLSASVGDRVTITCRASQDITNDLGWYQQKPGKAPKLLIYQASSLESGVPSRFSGSGSGTDFTLTISSLQPEDFATYYCQQSYTIPLTFGQGTKVEIK

SEQ ID NO: 553 - protein, 19 aa, Artificial Sequence
  Synthetic sequence
CARDGAWFGEEYYYGMDVW

SEQ ID NO: 554 - protein, 11 aa, Artificial Sequence
  Synthetic sequence
RASQGISNWLA

SEQ ID NO: 555 - protein, 10 aa, Artificial Sequence
  Synthetic sequence
QQYYSFPLYT

SEQ ID NO: 556 - protein, 124 aa, Artificial Sequence
  Synthetic sequence
QVQLVQSGAEVKKPGASVKVSCKASGYTFTGHYMHWVRQAPGQGLEWMGIINPSGGSTSYAQKFQGRVTMTRDTSTSTVYMELSSLRSEDTAVYYCARDGAWFGEEYYYGMDVWGQGTTVTVSS

SEQ ID NO: 557 - protein, 108 aa, Artificial Sequence
  Synthetic sequence
DIQMTQSPSSLSASVGDRVTITCRASQGISNWLAWYQQKPGKAPKLLIYDASNLETGVPSRFSGSGSGTDFTLTISSLQPEDFATYYCQQYYSFPLYTFGQGTKVEIK

SEQ ID NO: 558 - protein, 13 aa, Artificial Sequence
  Synthetic sequence
GMIYPRDGSTSYA

SEQ ID NO: 559 - protein, 13 aa, Artificial Sequence
  Synthetic sequence
CAMTGWGYGMDVW

SEQ ID NO: 560 - protein, 11 aa, Artificial Sequence
  Synthetic sequence
RASQGINNYLA

SEQ ID NO: 561 - protein, 9 aa, Artificial Sequence
  Synthetic sequence
QQSYSAPPT

SEQ ID NO: 562 - protein, 118 aa, Artificial Sequence
  Synthetic sequence
QVQLVQSGAEVKKPGASVKVSCKASGYTFTGYYMHWVRQAPGQGLEWMGMIYPRDGSTSYAQKFQGRVTMTRDTSTSTVYMELSSLRSEDTAVYYCAMTGWGYGMDVWGKGTTVTVSS

SEQ ID NO: 563 - protein, 107 aa, Artificial Sequence
  Synthetic sequence
DIQMTQSPSSLSASVGDRVTITCRASQGINNYLAWYQQKPGKAPKLLIYDASTLQSGVPSRFSGSGSGTDFTLTISSLQPEDFATYYCQQSYSAPPTFGQGTKLEIK

SEQ ID NO: 564 - protein, 121 aa, Artificial Sequence
  Synthetic sequence
EVQLLESGGGLVQPGGSLRLSCAASGFTFGDYAMSWVRQAPGKGLEWVAVVSYDGTNKYYADSVKGRFTISRDNSKNTLYLQMNSLRAEDTAVYYCAKDICSSTSCYFDLWGRGTLVTVSS

SEQ ID NO: 565 - protein, 107 aa, Artificial Sequence
  Synthetic sequence
DIQMTQSPSSLSASVGDRVTITCRASQNINNYVNWYQQKPGKAPKLLIYDASNLETGVPSRFSGSGSGTDFTLTISSLQPEDFATYYCQQANSFPPTFGQGTRLEIK

SEQ ID NO: 566 - protein, 122 aa, Artificial Sequence
  Synthetic sequence
QVQLVQSGAEVKKPGASVKVSCKASGYTFTSYYMHWVRQAPGQGLEWMGIIDPSGGSTSYAQKFQGRVTMTRDTSTSTVYMELSSLRSEDTAVYYCAREEWSSGGVGYFDYWGQGTLVTVSS

SEQ ID NO: 567 - protein, 107 aa, Artificial Sequence
  Synthetic sequence
DIQMTQSPSSLSASVGDRVTITCRASQGISSYLAWYQQKPGKAPKLLIYATSSLQTGVPSRFSGSGSGTDFTLTISSLQPEDFATYYCQQTYSIPITFGQGTRLEIK

SEQ ID NO: 568 - protein, 9 aa, Artificial Sequence
  Synthetic sequence
YPFTDYYMH

SEQ ID NO: 569 - protein, 13 aa, Artificial Sequence
  Synthetic sequence
GWIKPNSGDTEYA

SEQ ID NO: 570 - protein, 20 aa, Artificial Sequence
  Synthetic sequence
CARDRFVGKPDYYYYGMDVW

SEQ ID NO: 571 - protein, 11 aa, Artificial Sequence
  Synthetic sequence
RASQSISVWLA

SEQ ID NO: 572 - protein, 9 aa, Artificial Sequence
  Synthetic sequence
QQSYDTPYT

SEQ ID NO: 573 - protein, 125 aa, Artificial Sequence
  Synthetic sequence
QVQLVQSGAEVKKPGASVKVSCKASGYPFTDYYMHWVRQAPGQGLEWMGWIKPNSGDTEYAQKFQGRVTMTRDTSTSTVYMELSSLRSEDTAVYYCARDRFVGKPDYYYYGMDVWGQGTMVTVSS

SEQ ID NO: 574 - protein, 107 aa, Artificial Sequence
  Synthetic sequence
DIQMTQSPSSLSASVGDRVTITCRASQSISVWLAWYQQKPGKAPKLLIYAASSLQSGVPSRFSGSGSGTDFTLTISSLQPEDFATYYCQQSYDTPYTFGQGTKLEIK

SEQ ID NO: 575 - protein, 124 aa, Artificial Sequence
  Synthetic sequence
QVQLVQSGAEVKKPGASVKVSCKASGYTFTSYYMHWVRQAPGQGLEWMGIINPSGGSTSYAQKFQGRVTMTRDTSTSTVYMELSSLRSEDTAVYYCARDSVAGTGGRYYGMDVWGQGTLVTVSS

SEQ ID NO: 576 - protein, 107 aa, Artificial Sequence
  Synthetic sequence
DIQMTQSPSSLSASVGDRVTITCRASQGISNYFAWYQQKPGKAPKLLIYAASSLQGGVPSRFSGSGSGTDFTLTISSLQPEDFATYYCQQSYSLPYTFGQGTKLEIK

SEQ ID NO: 577 - protein, 13 aa, Artificial Sequence
  Synthetic sequence
GVINPIGGTTTYA

SEQ ID NO: 578 - protein, 16 aa, Artificial Sequence
  Synthetic sequence
CASGAPSYYYYGMDVW

SEQ ID NO: 579 - protein, 5 aa, Artificial Sequence
  Synthetic sequence
SYLAT

SEQ ID NO: 580 - protein, 121 aa, Artificial Sequence
  Synthetic sequence
QVQLVQSGAEVKKPGASVKVSCKASGYTFTSYYMHWVRQAPGQGLEWMGVINPIGGTTTYAQKFQGRVTMTRDTSTSTVYMELSSLRSEDTAVYYCASGAPSYYYYGMDVWGQGTLVTVSS

SEQ ID NO: 581 - protein, 107 aa, Artificial Sequence
  Synthetic sequence
DIQMTQSPSSLSASVGDRVTITCRASQSISSYLNWYQQKPGKAPKLLIYGTSYLATGVPSRFSGSGSGTDFTLTISSLQPEDFATYYCQQSYSTPLTFGQGTKVEIK

SEQ ID NO: 582 - protein, 9 aa, Artificial Sequence
  Synthetic sequence
YTFTSNYVH

SEQ ID NO: 583 - protein, 13 aa, Artificial Sequence
  Synthetic sequence
GRINPHSGDTSYA

SEQ ID NO: 584 - protein, 16 aa, Artificial Sequence
  Synthetic sequence
CARAGQLWSDWYFDLW

SEQ ID NO: 585 - protein, 5 aa, Artificial Sequence
  Synthetic sequence
TALRT

SEQ ID NO: 586 - protein, 9 aa, Artificial Sequence
  Synthetic sequence
QQSYSHPLT

SEQ ID NO: 587 - protein, 121 aa, Artificial Sequence
  Synthetic sequence
QVQLVQSGAEVKKPGASVKVSCKASGYTFTSNYVHWVRQAPGQGLEWMGRINPHSGDTSYAQKFQGRVTMTRDTSTSTVYMELSSLRSEDTAVYYCARAGQLWSDWYFDLWGRGTLVTVSS

SEQ ID NO: 588 - protein, 107 aa, Artificial Sequence
  Synthetic sequence
DIQMTQSPSSLSASVGDRVTITCQASQDIRNYLNWYQQKPGKAPKLLIYAATALRTGVPSRFSGSGSGTDFTLTISSLQPEDFATYYCQQSYSHPLTFGQGTKVEIK

SEQ ID NO: 589 - protein, 118 aa, Artificial Sequence
  Synthetic sequence
QVQLVQSGAEVKKPGASVKVSCKASGYTFTGYYMHWVRQAPGQGLEWMGIINPSGGNTKYAQKFQGRVTMTRDTSTSTVYMELSSLRSEDTAVYYCTTADYYYYMDVWGKGTTVTVSS

SEQ ID NO: 590 - protein, 106 aa, Artificial Sequence
  Synthetic sequence
DIQMTQSPSSLSASVGDRVTITCRASQGISNYLAWYQQKPGKAPKLLIYAASSLQSGVPSRFSGSGSGTDFTLTISSLQPEDFATYYCQQYYSNADFGQGTKVEIK

SEQ ID NO: 591 - protein, 119 aa, Artificial Sequence
  Synthetic sequence
EVQLLESGGGLVQPGGSLRLSCAASGFTFSDFWMHWVRQAPGKGLEWISYISGDSGYTNYADSVKGRFTISRDNSKNTLYLQMNSLRAEDTAVYYCARDRPYYYYMDVWGKGTTVTVSS

SEQ ID NO: 592 - protein, 107 aa, Artificial Sequence
  Synthetic sequence
DIQMTQSPSSLSASVGDRVTITCRASQSVSRSLAWYQQKPGKAPKLLIYAASSLQSGVPSRFSGSGSGTDFTLTISSLQPEDFATYYCQQYKSYPVTFGQGTKVEIK

SEQ ID NO: 593 - protein, 122 aa, Artificial Sequence
  Synthetic sequence
EVQLLESGGGLVQPGGSLRLSCAASGFTFDDYTMHWVRQAPGKGLEWVSDISGSGGSTYYADSVKGRFTISRDNSKNTLYLQMNSLRAEDTAVYYCAKDVVVAGTPLHFDYWGQGTLVTVSS

SEQ ID NO: 594 - protein, 107 aa, Artificial Sequence
  Synthetic sequence
DIQMTQSPSSLSASVGDRVTITCQASQDISNYLNWYQQKPGKAPKLLIYAASYLQSGVPSRFSGSGSGTDFTLTISSLQPEDFATYYCQQAHNYPITFGQGTRLEIK

SEQ ID NO: 595 - protein, 119 aa, Artificial Sequence
  Synthetic sequence
EVQLLESGGGLVQPGGSLRLSCAASEFTFSNAWMSWVRQAPGKGLEWVASISSTSAYIDYADSVKGRFTISRDNSKNTLYLQMNSLRAEDTAVYYCAREVVGATTFDYWGQGTLVTVSS

SEQ ID NO: 596 - protein, 107 aa, Artificial Sequence
  Synthetic sequence
DIQMTQSPSSLSASVGDRVTITCRASQSISTWLAWYQQKPGKAPKLLIYAASSLQSGVPSRFSGSGSGTDFTLTISSLQPEDFATYYCQQANAFPPTFGQGTRLEIK

SEQ ID NO: 597 - protein, 117 aa, Artificial Sequence
  Synthetic sequence
QVQLVQSGAEVKKPGSSVKVSCKASGGTFSSYAISWVRQAPGQGLEWMGWMEPHTGNTRYAQKFQGRVTITADESTSTAYMELSSLRSEDTAVYYCAKGGFSWFDPWGQGTLVTVSS

SEQ ID NO: 598 - protein, 113 aa, Artificial Sequence
  Synthetic sequence
DIVMTQSPDSLAVSLGERATINCKSSQSVLYSSNNKNYLAWYQQKPGQPPKLLIYWASTRESGVPDRFSGSGSGTDFTLTISSLQAEDVAVYYCQQYYSTPPTFGQGTRLEIK

SEQ ID NO: 599 - protein, 120 aa, Artificial Sequence
  Synthetic sequence
EVQLLESGGGLVKPGGSLRLSCAASGFTFDDYAMHWVRQAPGKGLEWVASITSSSAFIDYAASVKGRFTISRDDSKNTLYLQMNSLKTEDTAVYYCARERVDWNSYFDLWGRGTLVTVSS

SEQ ID NO: 600 - protein, 108 aa, Artificial Sequence
  Synthetic sequence
EIVMTQSPATLSVSPGERATLSCRASQGISNSYLAWYQQKPGQAPRLLIYGASTRATGIPARFSGSGSGTEFTLTISSLQSEDFAVYYCQQYYTYPPTFGPGTKVDIK

SEQ ID NO: 601 - protein, 16 aa, Artificial Sequence
  Synthetic sequence
CAKDLGVVVPAALDYW

SEQ ID NO: 602 - protein, 11 aa, Artificial Sequence
  Synthetic sequence
QASQDISNHLN

SEQ ID NO: 603 - protein, 5 aa, Artificial Sequence
  Synthetic sequence
SNLEA

SEQ ID NO: 604 - protein, 121 aa, Artificial Sequence
  Synthetic sequence
EVQLLESGGGLVQPGGSLRLSCAASGFTFDDYAMHWVRQAPGKGLEWVSAISGSGGSTYYADSVKGRFTISRDNSKNTLYLQMNSLRAEDTAVYYCAKDLGVVVPAALDYWGQGTTVTVSS

SEQ ID NO: 605 - protein, 107 aa, Artificial Sequence
  Synthetic sequence
DIQMTQSPSSLSASVGDRVTITCQASQDISNHLNWYQQKPGKAPKLLIYDASNLEAGVPSRFSGSGSGTDFTLTISSLQPEDFATYYCQQSYSTPLTFGGGTKVEIK

SEQ ID NO: 606 - protein, 119 aa, Artificial Sequence
  Synthetic sequence
EVQLLESGGGLVKPGGSLRLSCAASGFAFSSHWMHWVRQAPGKGLEWVAGTSGSGESRDYADFVKGRFTISRDDSKNTLYLQMNSLKTEDTAVYYCARETYYYYYMDVWGKGTTVTVSS

SEQ ID NO: 607 - protein, 107 aa, Artificial Sequence
  Synthetic sequence
DIQMTQSPSSLSASVGDRVTITCRASQGISNYLAWYQQKPGKAPKLLIYDAANLEGGVPSRFSGSGSGTDFTLTISSLQPEDFATYYCQQSDIFPPTFGQGTKVEIK

SEQ ID NO: 608 - protein, 119 aa, Artificial Sequence
  Synthetic sequence
QVQLVQSGAEVKKPGASVKVSCKASGYTFTRHWIHWVRQAPGQGLEWMGWINVKTGGAGYAQKFQGRVTMTRDTSTSTVYMELSSLRSEDTAVYYCARESSGWYGTDVWGQGTTVTVSS

SEQ ID NO: 609 - protein, 107 aa, Artificial Sequence
  Synthetic sequence
DIQMTQSPSSLSASVGDRATITCRASQSISNYLAWYQQKPGKAPKLLIYAASSLQSGVPSRFSGSGSGTDFTLTISSLQPEDFATYYCQQSNSFPLTFGGGTKVEIK

SEQ ID NO: 610 - protein, 120 aa, Artificial Sequence
  Synthetic sequence
EVQLLESGGGLVQPGGSLRLSCAASGFTFSSYWMHWVRQAPGKGLEWVAAISYDGKYKDYEDSVKGRFTISRDNSKNTLYLQMNSLRAEDTAVYYCARENKQWLASFDYWGQGTLVTVSS

SEQ ID NO: 611 - protein, 106 aa, Artificial Sequence
  Synthetic sequence
DIQMTQSPSSLSASVGDRVTITCQASQDISNFVNWYQQKPGKAPKLLIYAANLRSGVPSRFSGSGSGTDFTLTISSLQPEDFATYYCQQANSFPVTFGPGTKVDIK

SEQ ID NO: 612 - protein, 9 aa, Artificial Sequence
  Synthetic sequence
GTFSSSAIS

SEQ ID NO: 613 - protein, 13 aa, Artificial Sequence
  Synthetic sequence
GWISAYNGYTNYA

SEQ ID NO: 614 - protein, 16 aa, Artificial Sequence
  Synthetic sequence
CASRVHSGGSYPDDYW

SEQ ID NO: 615 - protein, 11 aa, Artificial Sequence
  Synthetic sequence
QASEHIYNYLN

SEQ ID NO: 616 - protein, 9 aa, Artificial Sequence
  Synthetic sequence
QQTDSIPIT

SEQ ID NO: 617 - protein, 121 aa, Artificial Sequence
  Synthetic sequence
QVQLVQSGAEVKKPGASVKVSCKASGGTFSSSAISWVRQAPGQGLEWMGWISAYNGYTNYAQKFQGRVTMTRDTSTSTVYMELSSLRSEDTAVYYCASRVHSGGSYPDDYWGQGTLVTVSS

SEQ ID NO: 618 - protein, 107 aa, Artificial Sequence
  Synthetic sequence
DIQMTQSPSSLSASVGDRVTITCQASEHIYNYLNWYQQKPGKAPKLLIYAASSLQSGVPSRFSGSGSGTDFTLTISSLQPEDFATYYCQQTDSIPITFGQGTKVEIK

SEQ ID NO: 619 - protein, 118 aa, Artificial Sequence
  Synthetic sequence
QVQLVQSGAEVKKPGASVKVSCKASGGSFTGYYMHWVRQAPGQGLEWMGWINPNDGAIHYAQNFQGRVTMTRDTSTSTVYMELSSLRSEDTAVYYCARDTVTGDFDYWGQGTLVTVSS

SEQ ID NO: 620 - protein, 107 aa, Artificial Sequence
  Synthetic sequence
DIQMTQSPSSLSASVGDRVTITCQASHDIDKYLNWYQQKPGKAPKLLIYAASSLQSGVPSRFSGSGSGTDFTLTISSLQPEDFATYYCQQANSLPLTFGGGTKVEIK

SEQ ID NO: 621 - protein, 9 aa, Artificial Sequence
  Synthetic sequence
GSFTGYYMH

SEQ ID NO: 622 - protein, 13 aa, Artificial Sequence
  Synthetic sequence
GWINPNDGAIHYA

SEQ ID NO: 623 - protein, 13 aa, Artificial Sequence
  Synthetic sequence
CARDTVTGDFDYW

SEQ ID NO: 624 - protein, 11 aa, Artificial Sequence
  Synthetic sequence
QASHDIDKYLN

SEQ ID NO: 625 - protein, 9 aa, Artificial Sequence
  Synthetic sequence
QQANSLPLT

SEQ ID NO: 626 - protein, 121 aa, Artificial Sequence
  Synthetic sequence
QVQLVQSGAEVKKPGASVKVSCKASGGTFSRYAVSWVRQAPGQGLEWMGWINPNSGGTSYAQRFQGRVTMTRDTSTSTVYMELSSLRSEDTAVYYCAKQGDYGGGYYFDYWGQGTLVTVSS

SEQ ID NO: 627 - protein, 107 aa, Artificial Sequence
  Synthetic sequence
DIQMTQSPSSLSASVGDRVTITCRASQSISSWLAWYQQKPGKAPKLLIYKTSTLESGVPSRFSGSGSGTDFTLTISSLQPEDFATYYCQQSYSTPFTFGQGTKVEIK

SEQ ID NO: 628 - protein, 9 aa, Artificial Sequence
  Synthetic sequence
GTFSRYAVS

SEQ ID NO: 629 - protein, 13 aa, Artificial Sequence
  Synthetic sequence
GWINPNSGGTSYA

SEQ ID NO: 630 - protein, 16 aa, Artificial Sequence
  Synthetic sequence
CAKQGDYGGGYYFDYW

SEQ ID NO: 631 - protein, 5 aa, Artificial Sequence
  Synthetic sequence
STLES

SEQ ID NO: 632 - protein, 9 aa, Artificial Sequence
  Synthetic sequence
QQSYSTPFT

SEQ ID NO: 633 - protein, 120 aa, Artificial Sequence
  Synthetic sequence
QVQLVQSGAEVKKPGASVKVSCKASGGTFSSYAISWVRQAPGQGLEWMGWMNPNSGNTGYAQKFQGRVTMTRDTSTSTVYMELSSLRSEDTAVYYCARVGYSYGYGMDVWGQGTTVTVSS

SEQ ID NO: 634 - protein, 107 aa, Artificial Sequence
  Synthetic sequence
DIQMTQSPSSLSASVGDRVTITCRASQSINNWLAWYQQKPGKAPKLLIYAASSLQSGVPSRFSGSGSGTDFTLTISSLQPEDFATYYCQQSYSTPFTFGPGTKVDIK

SEQ ID NO: 635 - protein, 15 aa, Artificial Sequence
  Synthetic sequence
CARVGYSYGYGMDVW

SEQ ID NO: 636 - protein, 11 aa, Artificial Sequence
  Synthetic sequence
RASQSINNWLA

SEQ ID NO: 637 - protein, 113 aa, Artificial Sequence
  Synthetic sequence
QVQLVQSGAEVKKPGASVKVSCKASGYSFTTYYMHWVRQAPGQGLEWMGIINPSGGSTSYAQKFQGRVTMTRDTSTSTVYMELSSLRSEDTAVYYCASGWVYWGQGTLVTVSS

SEQ ID NO: 638 - protein, 107 aa, Artificial Sequence
  Synthetic sequence
DIQMTQSPSSLSASVGDRVTITCQASRDIKNYLAWYQQKPGKAPKLLIYAASSLQSGVPSRFSGSGSGTDFTLTISSLQPEDFATYYCQQSYSTPPTFGPGTKVDIK

SEQ ID NO: 639 - protein, 9 aa, Artificial Sequence
  Synthetic sequence
YSFTTYYMH

SEQ ID NO: 640 - protein, 8 aa, Artificial Sequence
  Synthetic sequence
CASGWVYW

SEQ ID NO: 641 - protein, 11 aa, Artificial Sequence
  Synthetic sequence
QASRDIKNYLA

SEQ ID NO: 642 - protein, 9 aa, Artificial Sequence
  Synthetic sequence
QQSYSTPPT

SEQ ID NO: 643 - protein, 119 aa, Artificial Sequence
  Synthetic sequence
EVQLLESGGGLVQPGGSLRLSCAASGFTFSSYAMSWVRQAPGKGLEWVAAIWSDGSHQYYADSVKGRFTISRDNSKNTLYLQMNSLRAEDTAVYYCARGLGVERGLDYWGQGTLVTVSS

SEQ ID NO: 644 - protein, 107 aa, Artificial Sequence
  Synthetic sequence
DIQMTQSPSSLSASVGDRVTITCRASQSISSWLAWYQQKPGKAPKLLIYAASTLQSGVPSRFSGSGSGTDFTLTISSLQPEDFATYYCQQSYSTPLTFGQGTKVEIK

SEQ ID NO: 645 - protein, 13 aa, Artificial Sequence
  Synthetic sequence
AAIWSDGSHQYYA

SEQ ID NO: 646 - protein, 14 aa, Artificial Sequence
  Synthetic sequence
CARGLGVERGLDYW

SEQ ID NO: 647 - protein, 124 aa, Artificial Sequence
  Synthetic sequence
EVQLLESGGGLVQPGGSLRLSCAASGFTFSNYPMHWVRQAPGKGLEWVALISDDGTNEHYADSVKGRFTISRDNSKNTLYLQMNSLRAEDTAVYYCARDSKFANYYYYYDMDVWGQGTTVTVSS

SEQ ID NO: 648 - protein, 107 aa, Artificial Sequence
  Synthetic sequence
DIQMTQSPSSLSASVGDRVTITCRASQSINNYLSWYQQKPGKAPKLLIYDASNLETGVPSRFSGSGSGTDFTLTISSLQPEDFATYYCQQSYSTPLTFGPGTKVDIK

SEQ ID NO: 649 - protein, 9 aa, Artificial Sequence
  Synthetic sequence
FTFSNYPMH

SEQ ID NO: 650 - protein, 13 aa, Artificial Sequence
  Synthetic sequence
ALISDDGTNEHYA

SEQ ID NO: 651 - protein, 19 aa, Artificial Sequence
  Synthetic sequence
CARDSKFANYYYYYDMDVW

SEQ ID NO: 652 - protein, 11 aa, Artificial Sequence
  Synthetic sequence
RASQSINNYLS

SEQ ID NO: 653 - protein, 124 aa, Artificial Sequence
  Synthetic sequence
QVQLVQSGAEVKKPGASVKVSCKASGYSFTGHYIHWVRQAPGQGLEWMGIINPNGGSTTYAQKLQGRVTMTRDTSTSTVYMELSSLRSEDTAVYYCARGKFDFYGDYVTAFDIWGQGTMVTVSS

SEQ ID NO: 654 - protein, 113 aa, Artificial Sequence
  Synthetic sequence
DIVMTQSPDSLAVSLGERATINCRSSQSILYSSNNRDYLAWYQQKPGQPPKLLIYWASTRQSGVPDRFSGSGSGTDFTLTISSLQAEDVAVYYCQQYYSIPVTFGGGTKVEIK

SEQ ID NO: 655 - protein, 9 aa, Artificial Sequence
  Synthetic sequence
YSFTGHYIH

SEQ ID NO: 656 - protein, 13 aa, Artificial Sequence
  Synthetic sequence
GIINPNGGSTTYA

SEQ ID NO: 657 - protein, 19 aa, Artificial Sequence
  Synthetic sequence
CARGKFDFYGDYVTAFDIW

SEQ ID NO: 658 - protein, 17 aa, Artificial Sequence
  Synthetic sequence
RSSQSILYSSNNRDYLA

SEQ ID NO: 659 - protein, 5 aa, Artificial Sequence
  Synthetic sequence
STRQS

SEQ ID NO: 660 - protein, 9 aa, Artificial Sequence
  Synthetic sequence
QQYYSIPVT

SEQ ID NO: 661 - protein, 128 aa, Artificial Sequence
  Synthetic sequence
QVQLVQSGAEVKKPGASVKVSCKASGYTFSNYDMNWVRQAPGQGLEWMGWMNPNSGHTGSAPKFQGRVTMTRDTSTSTVYMELSSLRSEDTAVYYCARGAFGLHLGELSLHYYGMDVWGQGTTVTVSS

SEQ ID NO: 662 - protein, 107 aa, Artificial Sequence
  Synthetic sequence
DIQMTQSPSSLSASVGDRVTITCRASQSINNWLAWYQQKPGKAPKLLIYAASSLQGGVPSRFSGSGSGTDFTLTISSLQPEDFATYYCQQSYSFPYTFGQGTKLEIK

SEQ ID NO: 663 - protein, 9 aa, Artificial Sequence
  Synthetic sequence
YTFSNYDMN

SEQ ID NO: 664 - protein, 13 aa, Artificial Sequence
  Synthetic sequence
GWMNPNSGHTGSA

SEQ ID NO: 665 - protein, 23 aa, Artificial Sequence
  Synthetic sequence
CARGAFGLHLGELSLHYYGMDVW

SEQ ID NO: 666 - protein, 5 aa, Artificial Sequence
  Synthetic sequence
SSLQG

SEQ ID NO: 667 - protein, 9 aa, Artificial Sequence
  Synthetic sequence
QQSYSFPYT

SEQ ID NO: 668 - protein, 117 aa, Artificial Sequence
  Synthetic sequence
QVQLVQSGAEVKKPGSSVKVSCKASGYTFTGYYMHWVRQAPGQGLEWMGKIVPMFDAANYAPKFQGRVTITADESTSTAYMELSSLRSEDTAVYYCARGPKWELDTWGQGTLVTVSS

SEQ ID NO: 669 - protein, 107 aa, Artificial Sequence
  Synthetic sequence
DIQMTQSPSSLSASVGDRVTITCRASQSISRWLAWYQQKPGKAPKLLIYGASSLQSGVPSRFSGSGSGTDFTLTISSLQPEDFATYYCQQANSFPVTFGGGTKVEIK

SEQ ID NO: 670 - protein, 13 aa, Artificial Sequence
  Synthetic sequence
GKIVPMFDAANYA

SEQ ID NO: 671 - protein, 12 aa, Artificial Sequence
  Synthetic sequence
CARGPKWELDTW

SEQ ID NO: 672 - protein, 124 aa, Artificial Sequence
  Synthetic sequence
QVQLVQSGAEVKKPGASVKVSCKASGYTFTGYYMHWVRQAPGQGLEWMGIINPSGGSTSYAQKFQGRVTMTRDTSTSTVYMELSSLRSEDTAVYYCAKTAGYDWLPSGLGMDVWGQGTTVTVSS

SEQ ID NO: 673 - protein, 107 aa, Artificial Sequence
  Synthetic sequence
DIQMTQSPSSLSASVGDRVTITCRASQSINSWLAWYQQKPGKAPKLLIYYASSLQSGVPSRFSGSGSGTDFTLTISSLQPEDFATYYCQQGYSVPLSFGQGTKLEIK

SEQ ID NO: 674 - protein, 19 aa, Artificial Sequence
  Synthetic sequence
CAKTAGYDWLPSGLGMDVW

SEQ ID NO: 675 - protein, 11 aa, Artificial Sequence
  Synthetic sequence
RASQSINSWLA

SEQ ID NO: 676 - protein, 9 aa, Artificial Sequence
  Synthetic sequence
QQGYSVPLS

SEQ ID NO: 677 - protein, 118 aa, Artificial Sequence
  Synthetic sequence
QVQLVQSGAEVKKPGSSVKVSCKASGYTFSNYGITWVRQAPGQGLEWMGGIIPIFGSTASYAQKFQGRVTITADESTSTAYMELSSLRSEDTAVYYCARWRSDAFDIWGQGTMVTVSS

SEQ ID NO: 678 - protein, 107 aa, Artificial Sequence
  Synthetic sequence
DIQMTQSPSSLSASVGDRVTITCRASQGISNWLAWYQQKPGKAPKLLIYDASNLETGVPSRFSGSGSGTDFTLTISSLQPEDFATYYCQQSYSTPLTFGGGTKVEIK

SEQ ID NO: 679 - protein, 9 aa, Artificial Sequence
  Synthetic sequence
YTFSNYGIT

SEQ ID NO: 680 - protein, 14 aa, Artificial Sequence
  Synthetic sequence
GGIIPIFGSTASYA

SEQ ID NO: 681 - protein, 12 aa, Artificial Sequence
  Synthetic sequence
CARWRSDAFDIW

SEQ ID NO: 682 - protein, 120 aa, Artificial Sequence
  Synthetic sequence
QVQLVQSGAEVKKPGASVKVSCKASGGTFSTYAISWVRQAPGQGLEWMGWINPNSGGTNYAQKFQGRVTMTRDTSTSIVYMELSSLRSEDTAVYYCARVNYDFYYGMDVWGQGTTVTVSS

SEQ ID NO: 683 - protein, 107 aa, Artificial Sequence
  Synthetic sequence
DIQMTQSPSSLSASVGDRVTITCRASQGIRNDLGWYQQKPGKAPKLLIYRASTLNSGVPSRFSGSGSGTDFTLTISSLQPEDFATYYCQQSYSTPFTFGPGTKVDIK

SEQ ID NO: 684 - protein, 9 aa, Artificial Sequence
  Synthetic sequence
GTFSTYAIS

SEQ ID NO: 685 - protein, 15 aa, Artificial Sequence
  Synthetic sequence
CARVNYDFYYGMDVW

SEQ ID NO: 686 - protein, 11 aa, Artificial Sequence
  Synthetic sequence
RASQGIRNDLG

SEQ ID NO: 687 - protein, 5 aa, Artificial Sequence
  Synthetic sequence
STLNS

SEQ ID NO: 688 - protein, 120 aa, Artificial Sequence
  Synthetic sequence
QVQLVQSGAEVKKPGASVKVSCKASGGTFSTYAISWVRQAPGQGLEWMGWINPNSGGTNYAQKFQGRVTMTRDTSTSTVYMELSSLRSEDTAVYYCARVNYDFYYGMDVWGQGTTVTVSS

SEQ ID NO: 689 - protein, 118 aa, Artificial Sequence
  Synthetic sequence
EVQLLESGGGLVQPGGSLRLSCAASGFSFSSYDMSWVRQAPGKGLEWVSGISGSGSSTYYADSVKGRFTISRDNSKNTLYLQMNSLRAEDTAVYYCASPYGMGYMDVWGKGTTVTVSS

SEQ ID NO: 690 - protein, 107 aa, Artificial Sequence
  Synthetic sequence
DIQMTQSPSSLSASVGDRVTITCRASQDIANYLAWYQQKPGKAPKLLIYGASSVQTGVPSRFSGSGSGTDFTLTISSLQPEDFATYYCQQSYTTPYTFGQGTRLEIK

SEQ ID NO: 691 - protein, 9 aa, Artificial Sequence
  Synthetic sequence
FSFSSYDMS

SEQ ID NO: 692 - protein, 13 aa, Artificial Sequence
  Synthetic sequence
SGISGSGSSTYYA

SEQ ID NO: 693 - protein, 13 aa, Artificial Sequence
  Synthetic sequence
CASPYGMGYMDVW

SEQ ID NO: 694 - protein, 11 aa, Artificial Sequence
  Synthetic sequence
RASQDIANYLA

SEQ ID NO: 695 - protein, 5 aa, Artificial Sequence
  Synthetic sequence
SSVQT

SEQ ID NO: 696 - protein, 9 aa, Artificial Sequence
  Synthetic sequence
QQSYTTPYT

SEQ ID NO: 697 - protein, 120 aa, Artificial Sequence
  Synthetic sequence
QVQLVQSGAEVKKPGASVKVSCKASGGSFNNYAISWVRQAPGQGLEWMGWINPNTGGTSYAQKFQGRVTMTRDTSTSTVYMELSSLRSEDTAVYYCARVSYGVGYYMDVWGKGTTVTVSS

SEQ ID NO: 698 - protein, 107 aa, Artificial Sequence
  Synthetic sequence
DIQMTQSPSSLSASVGDRVTITCQASQDISRYLNWYQQKPGKAPKLLIYAASNLQSGVPSRFSGSGSGTDFTLTISSLQPEDFATYYCQQSYSTPFTFGPGTKVDIK

SEQ ID NO: 699 - protein, 9 aa, Artificial Sequence
  Synthetic sequence
GSFNNYAIS

SEQ ID NO: 700 - protein, 13 aa, Artificial Sequence
  Synthetic sequence
GWINPNTGGTSYA

SEQ ID NO: 701 - protein, 15 aa, Artificial Sequence
  Synthetic sequence
CARVSYGVGYYMDVW

SEQ ID NO: 702 - protein, 11 aa, Artificial Sequence
  Synthetic sequence
QASQDISRYLN

SEQ ID NO: 703 - protein, 107 aa, Artificial Sequence
  Synthetic sequence
DIQMTQSPSSLSASVGDRVTITCQASQDISRYLNWYQQKPGKAPKLLIYAASNLQSGVPSRFSGSGSGTDSTLTISSLQPEDFATYYCQQSYSTPFTFGPGTKVDIK

SEQ ID NO: 704 - protein, 129 aa, Artificial Sequence
  Synthetic sequence
QVQLVQSGAEVKKPGASVKVSCKASGYTFTDDYIHWVRQAPGQGLEWMGWMNTNSGNTGYAQKFQGRVTMTRDTSTSTVYMELSSLRSEDTAVYYCARGGSYSSGWYGRLDYYYGMDVWGQGTTVTVSS

SEQ ID NO: 705 - protein, 107 aa, Artificial Sequence
  Synthetic sequence
DIQMTQSPSSLSASVGDRVTITCRASQGVGNALGWYQQKPGKAPKLLIYAASSLQSGVPSRFSGSGSGTDFTLTISSLQPEDFATYYCQQAYSFPWTFGQGTKLEIK

SEQ ID NO: 706 - protein, 9 aa, Artificial Sequence
  Synthetic sequence
YTFTDDYIH

SEQ ID NO: 707 - protein, 13 aa, Artificial Sequence
  Synthetic sequence
GWMNTNSGNTGYA

SEQ ID NO: 708 - protein, 24 aa, Artificial Sequence
  Synthetic sequence
CARGGSYSSGWYGRLDYYYGMDVW

SEQ ID NO: 709 - protein, 11 aa, Artificial Sequence
  Synthetic sequence
RASQGVGNALG

SEQ ID NO: 710 - protein, 113 aa, Artificial Sequence
  Synthetic sequence
QVQLVQSGAEVKKPGASVKVSCKASGYTFTDYAMHWVRQAPGQGLEWMGWLNPNSGNTGYAPKFQGRVTMTRDTSTSTVYMELSSLRSEDTAVYYCAAGLFIWGQGTMVTVSS

SEQ ID NO: 711 - protein, 107 aa, Artificial Sequence
  Synthetic sequence
DIQMTQSPSSLSASVGDRVTITCRASQSINRWLAWYQQKPGKAPKLLIYDASSLESGVPSRFSGSGSGTDFTLTISSLQPEDFATYYCQQSYSIPITFGQGTRLEIK

SEQ ID NO: 712 - protein, 9 aa, Artificial Sequence
  Synthetic sequence
YTFTDYAMH

SEQ ID NO: 713 - protein, 13 aa, Artificial Sequence
  Synthetic sequence
GWLNPNSGNTGYA

SEQ ID NO: 714 - protein, 8 aa, Artificial Sequence
  Synthetic sequence
CAAGLFIW

SEQ ID NO: 715 - protein, 11 aa, Artificial Sequence
  Synthetic sequence
RASQSINRWLA

SEQ ID NO: 716 - protein, 5 aa, Artificial Sequence
  Synthetic sequence
SSLES

SEQ ID NO: 717 - protein, 9 aa, Artificial Sequence
  Synthetic sequence
QQSYSIPIT

SEQ ID NO: 718 - protein, 120 aa, Artificial Sequence
  Synthetic sequence
QVQLVQSGAEVKKPGSSVKVSCKASGGTFSSYAISWVRQAPGQGLEWMGGIIPGFGSPNYAPNFQGRVTITADESTSTAYMELSSLRSEDTAVYYCTTEYCSSTSCSDYWGQGTLVTVSS

SEQ ID NO: 719 - protein, 112 aa, Artificial Sequence
  Synthetic sequence
DIVMTQSPLSLPVTPGEPASISCRSSQSLLHSNGYNYLDWYLQKPGQSPQLLIYQGSNRAPGVPDRFSGSGSGTDFTLKISRVEAEDVGVYYCMQALQTPLTFGQGTKVEIK

SEQ ID NO: 720 - protein, 13 aa, Artificial Sequence
  Synthetic sequence
GGIIPGFGSPNYA

SEQ ID NO: 721 - protein, 15 aa, Artificial Sequence
  Synthetic sequence
CTTEYCSSTSCSDYW

SEQ ID NO: 722 - protein, 5 aa, Artificial Sequence
  Synthetic sequence
SNRAP

SEQ ID NO: 723 - protein, 9 aa, Artificial Sequence
  Synthetic sequence
MQALQTPLT

SEQ ID NO: 724 - protein, 125 aa, Artificial Sequence
  Synthetic sequence
QVQLVQSGAEVKKPGASVKVSCKASGYTFSDHYMHWVRQAPGQGLEWMGTINPSGGRTSYAQKFQGRVTMTRDTSTSTVYMELSSLRSEDTAVYYCAADNGHASGWLYYYGMDVWGQGTTVTVSS

SEQ ID NO: 725 - protein, 107 aa, Artificial Sequence
  Synthetic sequence
DIQMTQSPSSLSASVGDRVTITCRASQSISNWVAWYQQKPGKAPKLLIYRASTLQSGVPSRFSGSGSGTDFTLTISSLQPEDFATYYCQQSHSLPLTFGPGTKVDIK

SEQ ID NO: 726 - protein, 9 aa, Artificial Sequence
  Synthetic sequence
YTFSDHYMH

SEQ ID NO: 727 - protein, 13 aa, Artificial Sequence
  Synthetic sequence
GTINPSGGRTSYA

SEQ ID NO: 728 - protein, 20 aa, Artificial Sequence
  Synthetic sequence
CAADNGHASGWLYYYGMDVW

SEQ ID NO: 729 - protein, 11 aa, Artificial Sequence
  Synthetic sequence
RASQSISNWVA

SEQ ID NO: 730 - protein, 9 aa, Artificial Sequence
  Synthetic sequence
QQSHSLPLT

SEQ ID NO: 731 - protein, 116 aa, Artificial Sequence
  Synthetic sequence
EVQLLESGGGLVQPGGSLRLSCAASGFTFSSYAMSWVRQAPGKGLEWVSGISGGGGTTYYADSVKGRFTISRDNSKNTLYLQMNSLRAEDTAVYYCASEYYGMDVWGQGTTVTVSS

SEQ ID NO: 732 - protein, 107 aa, Artificial Sequence
  Synthetic sequence
DIQMTQSPSSLSASVGDRVTITCRASQSISGWLAWYQQKPGKAPKLLIYAASSLQSGVPSRFSGSGSGTDFTLTISSLQPEDFATYYCQQYRNFPYTFGQGTKLEIK

SEQ ID NO: 733 - protein, 13 aa, Artificial Sequence
  Synthetic sequence
SGISGGGGTTYYA

SEQ ID NO: 734 - protein, 11 aa, Artificial Sequence
  Synthetic sequence
CASEYYGMDVW

SEQ ID NO: 735 - protein, 11 aa, Artificial Sequence
  Synthetic sequence
RASQSISGWLA

SEQ ID NO: 736 - protein, 9 aa, Artificial Sequence
  Synthetic sequence
QQYRNFPYT

SEQ ID NO: 737 - protein, 113 aa, Artificial Sequence
  Synthetic sequence
QVQLVQSGAEVKKPGASVKVSCKASGYTFSGYYMHWVRQAPGQGLEWMGVINPSGGSTSYAQKFQGRVTMTRDTSTSTVYMELSSLRSEDTAVYYCAEGFDYWGQGTLVTVSS

SEQ ID NO: 738 - protein, 107 aa, Artificial Sequence
  Synthetic sequence
EIVMTQSPATLSVSPGERATLSCRASQGVGRSLAWYQQKPGQAPRLLIYGASTRATGIPARFSGSGSGTEFTLTISSLQSEDFAVYYCQQYYTTPITFGQGTRLEIK

SEQ ID NO: 739 - protein, 9 aa, Artificial Sequence
  Synthetic sequence
YTFSGYYMH

SEQ ID NO: 740 - protein, 13 aa, Artificial Sequence
  Synthetic sequence
GVINPSGGSTSYA

SEQ ID NO: 741 - protein, 8 aa, Artificial Sequence
  Synthetic sequence
CAEGFDYW

SEQ ID NO: 742 - protein, 11 aa, Artificial Sequence
  Synthetic sequence
RASQGVGRSLA

SEQ ID NO: 743 - protein, 9 aa, Artificial Sequence
  Synthetic sequence
QQYYTTPIT

SEQ ID NO: 744 - protein, 120 aa, Artificial Sequence
  Synthetic sequence
QVQLVQSGAEVKKPGASVKVSCKASGGTFSNYAISWVRQAPGQGLEWMGWMNPNSGNTGYAQKFQGRVTMTRDTSTSTVYMELSSLRSEDTAVYYCARVNYYYYYGMDVWGQGTTVTVSS

SEQ ID NO: 745 - protein, 107 aa, Artificial Sequence
  Synthetic sequence
DIQMTQSPSSLSASVGDRVTITCQASQDISNYLNWYQQKPGKAPKLLIYKASTLKSGVPSRFSGSGSGTDFTLTISSLQPEDFATYYCQQADNLPFTFGPGTKVDIK

SEQ ID NO: 746 - protein, 9 aa, Artificial Sequence
  Synthetic sequence
GTFSNYAIS

SEQ ID NO: 747 - protein, 15 aa, Artificial Sequence
  Synthetic sequence
CARVNYYYYYGMDVW

SEQ ID NO: 748 - protein, 5 aa, Artificial Sequence
  Synthetic sequence
STLKS

SEQ ID NO: 749 - protein, 9 aa, Artificial Sequence
  Synthetic sequence
QQADNLPFT

SEQ ID NO: 750 - protein, 122 aa, Artificial Sequence
  Synthetic sequence
QVQLVQSGAEVKKPGASVKVSCKASGYTFTNYYMHWVRQAPGQGLEWMGIINPSGGSTSYAQRFQGRVTMTRDTSTSTVYMELSSLRSEDTAVYYCARDWGWDYYYYGMDVWGQGTTVTVSS

SEQ ID NO: 751 - protein, 107 aa, Artificial Sequence
  Synthetic sequence
DIQMTQSPSSLSASVGDRVTITCQASRDISNYLNWYQQKPGKAPKLLIYAASSLQSGVPSRFSGSGSGTDFTLTISSLQPEDFATYYCQQANSFPPTFGQGTKLEIK

SEQ ID NO: 752 - protein, 17 aa, Artificial Sequence
  Synthetic sequence
CARDWGWDYYYYGMDVW

SEQ ID NO: 753 - protein, 11 aa, Artificial Sequence
  Synthetic sequence
QASRDISNYLN

SEQ ID NO: 754 - protein, 9 aa, Artificial Sequence
  Synthetic sequence
QQANSFPPT

SEQ ID NO: 755 - protein, 119 aa, Artificial Sequence
  Synthetic sequence
EVQLLESGGGLVQPGGSLRLSCAASGFTFSNSDMSWVRQAPGKGLEWVSGITISGGSTYYADSVRGRFTISRDNSKNTLYLQMSSLRAEDTAVYYCARGRGGSGWLDYWGQGTLVTVSS

SEQ ID NO: 756 - protein, 113 aa, Artificial Sequence
  Synthetic sequence
DIVMTQSPDSLAVSLGERATINCKSSQSVLYSPNNKNYLAWYQQKPGQPPKLLIYWASTRESGVPDRFSGSGSGTDFTLTISSLQAEDVAVYYCQQYYTTPPTFGQGTRLEIK

SEQ ID NO: 757 - protein, 9 aa, Artificial Sequence
  Synthetic sequence
FTFSNSDMS

SEQ ID NO: 758 - protein, 13 aa, Artificial Sequence
  Synthetic sequence
SGITISGGSTYYA

SEQ ID NO: 759 - protein, 14 aa, Artificial Sequence
  Synthetic sequence
CARGRGGSGWLDYW

SEQ ID NO: 760 - protein, 17 aa, Artificial Sequence
  Synthetic sequence
KSSQSVLYSPNNKNYLA

SEQ ID NO: 761 - protein, 9 aa, Artificial Sequence
  Synthetic sequence
QQYYTTPPT

SEQ ID NO: 762 - protein, 107 aa, Artificial Sequence
  Synthetic sequence
DIQMTQSPSSLSASVGDRVTITCRASQSISRWLAWYQQKPGKAPKLLIYGASSLQSGVPSRFSGSGSGTDFTLTISSLQPEDFATYYCQQANSFPVTFGGGTKVDIK

SEQ ID NO: 763 - protein, 107 aa, Artificial Sequence
  Synthetic sequence
DIQMTQSPSSLSASVGDRVTITCRASQSISRWLAWYQQKPGKAPKLLIYGASSLQSGVPSRFSGSGSGTDFTFTISSLQPEDFATYYCQQANSFPVTFGGGTKVDIK

SEQ ID NO: 764 - protein, 120 aa, Artificial Sequence
  Synthetic sequence
QVQLVQSGAEVKKPGSSVKVSCKASGGDFSNYFVSWVRQAPGQGLEWMGWINPHNGDTMYAQKFQGRVTITADESTSTAYMELSSLRSEDTAVYYCARGGYSYGYTFDIWGQGTMVTVSS

SEQ ID NO: 765 - protein, 107 aa, Artificial Sequence
  Synthetic sequence
DIQMTQSPSSLSASVGDRVTITCRASQSISTWLAWYQQKPGKAPKLLIYAASTLQSGVPSRFSGSGSGTDFTLTISSLQPEDFATYYCQQSYSTPFTFGGGTKVEIK

SEQ ID NO: 766 - protein, 9 aa, Artificial Sequence
  Synthetic sequence
GDFSNYFVS

SEQ ID NO: 767 - protein, 13 aa, Artificial Sequence
  Synthetic sequence
GWINPHNGDTMYA

SEQ ID NO: 768 - protein, 15 aa, Artificial Sequence
  Synthetic sequence
CARGGYSYGYTFDIW

SEQ ID NO: 769 - protein, 119 aa, Artificial Sequence
  Synthetic sequence
EVQLLESGGGLVQPGGSLRLSCAASGFTFSNSDMSWVRQAPGKGLEWVSGITISGGSTYYADSVKGRFTISRDNSKNTLYLQMNSLRAEDTAVYYCARGRGGSGWLDYWGQGTLVTVSS

SEQ ID NO: 770 - protein, 113 aa, Artificial Sequence
  Synthetic sequence
DIVMTQSPDSLAVSLGERATINCKSSQSVLYSPNNKNYLAWYQQKPGQPPKLLIYWASTRESGVPDRFSGSGSGTDFTLTISSLQAEDVAVYYCQQYYITPPTFGQGTRLEIK

SEQ ID NO: 771 - protein, 9 aa, Artificial Sequence
  Synthetic sequence
QQYYITPPT

SEQ ID NO: 772 - protein, 113 aa, Artificial Sequence
  Synthetic sequence
QVQLVQSGAEVKKPGSSVKVSCKASGHTFTDYYMHWVRQAPGQGLEWMGIINPSGGSTSYAQKFQGRVTITADESTSTAYMELSSLRSEDTAVYYCASGWTDWGQGTLVTVSS

SEQ ID NO: 773 - protein, 108 aa, Artificial Sequence
  Synthetic sequence
EIVMTQSPATLSVSPGERATLSCRASQSVSSYLAWYQQKPGQAPRLLIYGTSSRATGIPARFSGSGSGTEFTLTISSLQSEDFAVYYCQQYTTSPITFGQGTRLEIKR

SEQ ID NO: 774 - protein, 9 aa, Artificial Sequence
  Synthetic sequence
HTFTDYYMH

SEQ ID NO: 775 - protein, 8 aa, Artificial Sequence
  Synthetic sequence
CASGWTDW

SEQ ID NO: 776 - protein, 11 aa, Artificial Sequence
  Synthetic sequence
RASQSVSSYLA

SEQ ID NO: 777 - protein, 5 aa, Artificial Sequence
  Synthetic sequence
SSRAT

SEQ ID NO: 778 - protein, 9 aa, Artificial Sequence
  Synthetic sequence
QQYTTSPIT

SEQ ID NO: 779 - protein, 117 aa, Artificial Sequence
  Synthetic sequence
QVQLVQSGAEVKKPGASVKVSCKASGYTFTDYYMHWVRQAPGQGLEWMGGIFPVFGSSTYAQKFQGRVTMTRDTSTSTVYMELSSLRSEDTAVYYCARDHGSGLDVWGQGTTVTVSS

SEQ ID NO: 780 - protein, 107 aa, Artificial Sequence
  Synthetic sequence
DIQMTQSPSSLSASVGDRVTITCQASQDISNYLNWYQQKPGKAPKLLIYDAKDLHPGVPSRFSGSGSGTDFTLTISSLQPEDFATYYCQESFSTLTFGQGTKVEIKR

SEQ ID NO: 781 - protein, 9 aa, Artificial Sequence
  Synthetic sequence
YTFTDYYMH

SEQ ID NO: 782 - protein, 13 aa, Artificial Sequence
  Synthetic sequence
GGIFPVFGSSTYA

SEQ ID NO: 783 - protein, 12 aa, Artificial Sequence
  Synthetic sequence
CARDHGSGLDVW

SEQ ID NO: 784 - protein, 5 aa, Artificial Sequence
  Synthetic sequence
KDLHP

SEQ ID NO: 785 - protein, 8 aa, Artificial Sequence
  Synthetic sequence
QESFSTLT

SEQ ID NO: 786 - protein, 113 aa, Artificial Sequence
  Synthetic sequence
QVQLVQSGAEVKKPGASVKVSCKASGYSFTTYYMHWVRQAPGQGLEWMGIIAPSGGSTSYAQKFQGRVTMTRDTSTSTVYMELSSLRSEDTAVYYCASGWVYWGQGTLVTVSS

SEQ ID NO: 787 - protein, 13 aa, Artificial Sequence
  Synthetic sequence
GIIAPSGGSTSYA

SEQ ID NO: 788 - protein, 113 aa, Artificial Sequence
  Synthetic sequence
QVQLVQSGAEVKKPGASVKVSCKASGYSFTTYYMHWVRQAPGQGLEWMGIIGPSGGSTSYAQKFQGRVTMTRDTSTSTVYMELSSLRSEDTAVYYCASGWVYWGQGTLVTVSS

SEQ ID NO: 789 - protein, 125 aa, Artificial Sequence
  Synthetic sequence
QVQLVQSGAEVKKPGASVKVSCKASGYTFSDHYMHWVRQAPGQGLEWMGTIAPSGGRTSYAQKFQGRVTMTRDTSTSTVYMELSSLRSEDTAVYYCAADNGHASGWLYYYGMDVWGQGTTVTVSS

SEQ ID NO: 790 - protein, 13 aa, Artificial Sequence
  Synthetic sequence
GTIAPSGGRTSYA

SEQ ID NO: 791 - protein, 125 aa, Artificial Sequence
  Synthetic sequence
QVQLVQSGAEVKKPGASVKVSCKASGYTFSDHYMHWVRQAPGQGLEWMGTIGPSGGRTSYAQKFQGRVTMTRDTSTSTVYMELSSLRSEDTAVYYCAADNGHASGWLYYYGMDVWGQGTTVTVSS

SEQ ID NO: 792 - protein, 10 aa, Artificial Sequence
  Synthetic sequence
GGGGSGGGGS

SEQ ID NO: 793 - protein, 14 aa, Artificial Sequence
  Synthetic sequence
VSRINSYGTSTTYA

SEQ ID NO: 794 - protein, 9 aa, Artificial Sequence
  Synthetic sequence
IYGASSLQS

SEQ ID NO: 795 - protein, 8 aa, Artificial Sequence
  Synthetic sequence
YGASSLQS

SEQ ID NO: 796 - protein, 588 aa, Artificial Sequence
  Synthetic sequence
EVQLLESGGGLVQPGGSLRLSCAASGFTFNNYAFHWVRQAPGKGLEWVSRINSYGTSTTYADSVKGRFTISRDNSKNTLYLQMNSLRAEDTAVYYCAREGPVAGYWYFDLWGQGTLVTVSSASTKGPSVFPLAPSSKSTSGGTAALGCLVKDYFPEPVTVSWNSGALTSGVHTFPAVLQSSGLYSLSSVVTVPSSSLGTQTYICNVNHKPSNTKVDKKVEPKSCDKTHTCPPCPAPEAAGAPSVFLFPPKPKDTLMISRTPEVTCVVVDVSHEDPEVKFNWYVDGVEVHNAKTKPREEQYNSTYRVVSVLTVLHQDWLNGKEYKCKVSNKALPAPIEKTISKAKGQPREPQVYTLPPSREEMTKNQVSLTCLVKGFYPSDIAVEWESNGQPENNYKTTPPVLDSDGSFFLYSKLTVDKSRWQQGNVFSCSVMHEALHNHYTQKSLSLSPGGGGGSAPTSSSTKKTQLQLEHLLLDLQMILNGINNYKNPKLTRMLTFKFYMPKKATELKHLQCLEEELKPLEEALNLAPSKNFHLRPRDLISDINVIVLELKGSETTFMCEYADETATIVEFINRWITFSQSIISTLT

SEQ ID NO: 797 - protein, 215 aa, Artificial Sequence
  Synthetic sequence
DIQMTQSPSSLSASVGDRVTITCRASQIIGTNLAWYQQKPGKAPKLLIYGASSLQSGVPSRFSGSGSGTDFTLTISSLQPEDFATYYCQQSYRLPFTFGQGTKVEIKRRTVAAPSVFIFPPSDEQLKSGTASVVCLLNNFYPREAKVQWKVDNALQSGNSQESVTEQDSKDSTYSLSSTLTLSKADYEKHKVYACEVTHQGLSSPVTKSFNRGEC

SEQ ID NO: 798 - protein, 586 aa, Artificial Sequence
  Synthetic sequence
EVQLLESGGGLVQPGGSLRLSCAASGFTFSDFWMHWVRQAPGKGLEWISYISGDSGYTNYADSVKGRFTISRDNSKNTLYLQMNSLRAEDTAVYYCARDRPYYYYMDVWGKGTTVTVSSASTKGPSVFPLAPSSKSTSGGTAALGCLVKDYFPEPVTVSWNSGALTSGVHTFPAVLQSSGLYSLSSVVTVPSSSLGTQTYICNVNHKPSNTKVDKKVEPKSCDKTHTCPPCPAPEAAGAPSVFLFPPKPKDTLMISRTPEVTCVVVDVSHEDPEVKFNWYVDGVEVHNAKTKPREEQYNSTYRVVSVLTVLHQDWLNGKEYKCKVSNKALPAPIEKTISKAKGQPREPQVYTLPPSREEMTKNQVSLTCLVKGFYPSDIAVEWESNGQPENNYKTTPPVLDSDGSFFLYSKLTVDKSRWQQGNVFSCSVMHEALHNHYTQKSLSLSPGGGGGSAPTSSSTKKTQLQLEHLLLDLQMILNGINNYKNPKLTRMLTFKFYMPKKATELKHLQCLEEELKPLEEALNLAPSKNFHLRPRDLISDINVIVLELKGSETTFMCEYADETATIVEFINRWITFSQSIISTLT

SEQ ID NO: 799 - protein, 214 aa, Artificial Sequence
  Synthetic sequence
DIQMTQSPSSLSASVGDRVTITCRASQSVSRSLAWYQQKPGKAPKLLIYAASSLQSGVPSRFSGSGSGTDFTLTISSLQPEDFATYYCQQYKSYPVTFGQGTKVEIKRTVAAPSVFIFPPSDEQLKSGTASVVCLLNNFYPREAKVQWKVDNALQSGNSQESVTEQDSKDSTYSLSSTLTLSKADYEKHKVYACEVTHQGLSSPVTKSFNRGEC

SEQ ID NO: 800 - protein, 587 aa, Artificial Sequence
  Synthetic sequence
EVQLLESGGGLVKPGGSLRLSCAASGFTFDDYAMHWVRQAPGKGLEWVASITSSSAFIDYAASVKGRFTISRDDSKNTLYLQMNSLKTEDTAVYYCARERVDWNSYFDLWGRGTLVTVSSASTKGPSVFPLAPSSKSTSGGTAALGCLVKDYFPEPVTVSWNSGALTSGVHTFPAVLQSSGLYSLSSVVTVPSSSLGTQTYICNVNHKPSNTKVDKKVEPKSCDKTHTCPPCPAPEAAGAPSVFLFPPKPKDTLMISRTPEVTCVVVDVSHEDPEVKFNWYVDGVEVHNAKTKPREEQYNSTYRVVSVLTVLHQDWLNGKEYKCKVSNKALPAPIEKTISKAKGQPREPQVYTLPPSREEMTKNQVSLTCLVKGFYPSDIAVEWESNGQPENNYKTTPPVLDSDGSFFLYSKLTVDKSRWQQGNVFSCSVMHEALHNHYTQKSLSLSPGGGGGSAPTSSSTKKTQLQLEHLLLDLQMILNGINNYKNPKLTRMLTFKFYMPKKATELKHLQCLEEELKPLEEALNLAPSKNFHLRPRDLISDINVIVLELKGSETTFMCEYADETATIVEFINRWITFSQSIISTLT

SEQ ID NO: 801 - protein, 215 aa, Artificial Sequence
  Synthetic sequence
EIVMTQSPATLSVSPGERATLSCRASQGISNSYLAWYQQKPGQAPRLLIYGASTRATGIPARFSGSGSGTEFTLTISSLQSEDFAVYYCQQYYTYPPTFGPGTKVDIKRTVAAPSVFIFPPSDEQLKSGTASVVCLLNNFYPREAKVQWKVDNALQSGNSQESVTEQDSKDSTYSLSSTLTLSKADYEKHKVYACEVTHQGLSSPVTKSFNRGEC

SEQ ID NO: 802 - protein, 9 aa, Artificial Sequence
  Synthetic sequence
QQSYRLPFT

SEQ ID NO: 803 - protein, 5 aa, Artificial Sequence
  Synthetic sequence
NYAFH

SEQ ID NO: 804 - protein, 17 aa, Artificial Sequence
  Synthetic sequence
RINSYGTSTTYADSVKG

SEQ ID NO: 805 - protein, 12 aa, Artificial Sequence
  Synthetic sequence
EGPVAGYWYFDL

SEQ ID NO: 806 - protein, 6 aa, Artificial Sequence
  Synthetic sequence
QIIGTN

SEQ ID NO: 807 - protein, 8 aa, Artificial Sequence
  Synthetic sequence
GFTFNNYA

SEQ ID NO: 808 - protein, 8 aa, Artificial Sequence
  Synthetic sequence
INSYGTST

SEQ ID NO: 809 - protein, 14 aa, Artificial Sequence
  Synthetic sequence
AREGPVAGYWYFDL

SEQ ID NO: 810 - protein, 7 aa, Artificial Sequence
  Synthetic sequence
GFTFNNY

SEQ ID NO: 811 - protein, 6 aa, Artificial Sequence
  Synthetic sequence
NSYGTS

SEQ ID NO: 812 - protein, 11 aa, Artificial Sequence [sequence omitted]

SEQ ID NO: 813 - protein, 5 aa, Artificial Sequence
  Synthetic sequence
DFWMH

SEQ ID NO: 814 - protein, 17 aa, Artificial Sequence
  Synthetic sequence
YISGDSGYTNYADSVKG

SEQ ID NO: 815 - protein, 10 aa, Artificial Sequence
  Synthetic sequence
DRPYYYYMDV

SEQ ID NO: 816 - protein, 6 aa, Artificial Sequence
  Synthetic sequence
QSVSRS

SEQ ID NO: 817 - protein, 8 aa, Artificial Sequence
  Synthetic sequence
GFTFSDFW

SEQ ID NO: 818 - protein, 8 aa, Artificial Sequence
  Synthetic sequence
ISGDSGYT

SEQ ID NO: 819 - protein, 12 aa, Artificial Sequence
  Synthetic sequence
ARDRPYYYYMDV

SEQ ID NO: 820 - protein, 7 aa, Artificial Sequence
  Synthetic sequence
GFTFSDF

SEQ ID NO: 821 - protein, 6 aa, Artificial Sequence
  Synthetic sequence
SGDSGY

SEQ ID NO: 822 - protein, 11 aa, Artificial Sequence [sequence omitted]

SEQ ID NO: 823 - protein, 5 aa, Artificial Sequence
  Synthetic sequence
DYAMH

SEQ ID NO: 824 - protein, 17 aa, Artificial Sequence
  Synthetic sequence
SITSSSAFIDYAASVKG

SEQ ID NO: 825 - protein, 11 aa, Artificial Sequence
  Synthetic sequence
ERVDWNSYFDL

SEQ ID NO: 826 - protein, 7 aa, Artificial Sequence
  Synthetic sequence
QGISNSY

SEQ ID NO: 827 - protein, 8 aa, Artificial Sequence
  Synthetic sequence
GFTFDDYA

SEQ ID NO: 828 - protein, 8 aa, Artificial Sequence
  Synthetic sequence
ITSSSAFI

SEQ ID NO: 829 - protein, 13 aa, Artificial Sequence
  Synthetic sequence
ARERVDWNSYFDL

SEQ ID NO: 830 - protein, 7 aa, Artificial Sequence
  Synthetic sequence
GFTFDDY

SEQ ID NO: 831 - protein, 6 aa, Artificial Sequence
  Synthetic sequence
TSSSAF

SEQ ID NO: 832 - protein, 17 aa, Artificial Sequence
  Synthetic sequence
WLNPNSGNTGYAPKFQG

SEQ ID NO: 833 - protein, 6 aa, Artificial Sequence
  Synthetic sequence
AAGLFI

SEQ ID NO: 834 - protein, 6 aa, Artificial Sequence
  Synthetic sequence
QSINRW

SEQ ID NO: 835 - protein, 8 aa, Artificial Sequence
  Synthetic sequence
GYTFTDYA

SEQ ID NO: 836 - protein, 8 aa, Artificial Sequence
  Synthetic sequence
LNPNSGNT

SEQ ID NO: 837 - protein, 7 aa, Artificial Sequence
  Synthetic sequence
GYTFTDY

SEQ ID NO: 838 - protein, 6 aa, Artificial Sequence
  Synthetic sequence
NPNSGN

SEQ ID NO: 839 - protein, 7 aa, Artificial Sequence
  Synthetic sequence
RASTLQS

SEQ ID NO: 840 - protein, 5 aa, Artificial Sequence
  Synthetic sequence
DHYMH

SEQ ID NO: 841 - protein, 17 aa, Artificial Sequence
  Synthetic sequence
TINPSGGRTSYAQKFQG

SEQ ID NO: 842 - protein, 18 aa, Artificial Sequence
  Synthetic sequence
AADNGHASGWLYYYGMDV

SEQ ID NO: 843 - protein, 6 aa, Artificial Sequence
  Synthetic sequence
QSISNW

SEQ ID NO: 844 - protein, 8 aa, Artificial Sequence
  Synthetic sequence
GYTFSDHY

SEQ ID NO: 845 - protein, 8 aa, Artificial Sequence
  Synthetic sequence
INPSGGRT

SEQ ID NO: 846 - protein, 7 aa, Artificial Sequence
  Synthetic sequence
GYTFSDH

SEQ ID NO: 847 - protein, 6 aa, Artificial Sequence
  Synthetic sequence
NPSGGR

SEQ ID NO: 848 - protein, 14 aa, Artificial Sequence
  Synthetic sequence
NGHASGWLYYYGMD

SEQ ID NO: 849 - protein, 7 aa, Artificial Sequence
  Synthetic sequence
WASTRES

SEQ ID NO: 850 - protein, 5 aa, Artificial Sequence
  Synthetic sequence
NSDMS

SEQ ID NO: 851 - protein, 17 aa, Artificial Sequence
  Synthetic sequence
GITISGGSTYYADSVKG

SEQ ID NO: 852 - protein, 12 aa, Artificial Sequence
  Synthetic sequence
ARGRGGSGWLDY

SEQ ID NO: 853 - protein, 12 aa, Artificial Sequence
  Synthetic sequence
QSVLYSPNNKNY

SEQ ID NO: 854 - protein, 8 aa, Artificial Sequence
  Synthetic sequence
GFTFSNSD

SEQ ID NO: 855 - protein, 8 aa, Artificial Sequence
  Synthetic sequence
ITISGGST

SEQ ID NO: 856 - protein, 7 aa, Artificial Sequence
  Synthetic sequence
GFTFSNS

SEQ ID NO: 857 - protein, 6 aa, Artificial Sequence
  Synthetic sequence
TISGGS

SEQ ID NO: 858 - protein, 8 aa, Artificial Sequence
  Synthetic sequence
RGGSGWLD

SEQ ID NO: 859 - protein, 5 aa, Artificial Sequence
  Synthetic sequence
TYYMH

SEQ ID NO: 860 - protein, 17 aa, Artificial Sequence
  Synthetic sequence
IINPSGGSTSYAQKFQG

SEQ ID NO: 861 - protein, 6 aa, Artificial Sequence
  Synthetic sequence
ASGWVY

SEQ ID NO: 862 - protein, 6 aa, Artificial Sequence
  Synthetic sequence
RDIKNY

SEQ ID NO: 863 - protein, 8 aa, Artificial Sequence
  Synthetic sequence
GYSFTTYY

SEQ ID NO: 864 - protein, 8 aa, Artificial Sequence
  Synthetic sequence
INPSGGST

SEQ ID NO: 865 - protein, 7 aa, Artificial Sequence
  Synthetic sequence
GYSFTTY

SEQ ID NO: 866 - protein, 6 aa, Artificial Sequence
  Synthetic sequence
NPSGGS

SEQ ID NO: 867 - protein, 17 aa, Artificial Sequence
  Synthetic sequence
GITISGGSTYYADSVRG

SEQ ID NO: 868 - protein, 5 aa, Artificial Sequence
  Synthetic sequence
DDYIH

SEQ ID NO: 869 - protein, 17 aa, Artificial Sequence
  Synthetic sequence
WMNTNSGNTGYAQKFQG

SEQ ID NO: 870 - protein, 22 aa, Artificial Sequence
  Synthetic sequence
ARGGSYSSGWYGRLDYYYGMDV

SEQ ID NO: 871 - protein, 6 aa, Artificial Sequence
  Synthetic sequence
QGVGNA

SEQ ID NO: 872 - protein, 8 aa, Artificial Sequence
  Synthetic sequence
GYTFTDDY

SEQ ID NO: 873 - protein, 8 aa, Artificial Sequence
  Synthetic sequence
MNTNSGNT

SEQ ID NO: 874 - protein, 7 aa, Artificial Sequence
  Synthetic sequence
GYTFTDD

SEQ ID NO: 875 - protein, 6 aa, Artificial Sequence
  Synthetic sequence
NTNSGN

SEQ ID NO: 876 - protein, 18 aa, Artificial Sequence
  Synthetic sequence
GSYSSGWYGRLDYYYGMD

SEQ ID NO: 877 - protein, 18 aa, Artificial Sequence
  Synthetic sequence
KESGSVSSEQLAQFRSLD

SEQ ID NO: 878 - protein, 14 aa, Artificial Sequence
  Synthetic sequence
EGKSSGSGSESKST

SEQ ID NO: 879 - protein, 12 aa, Artificial Sequence
  Synthetic sequence
GSAGSAAGSGEF

SEQ ID NO: 880 - protein, 20 aa, Artificial Sequence
  Synthetic sequence
LEAGCKNFFPRSFTSCGSLE

SEQ ID NO: 881 - protein, 12 aa, Artificial Sequence
  Synthetic sequence
CRRRRRREAEAC

SEQ ID NO: 882 - protein, 7 aa, Artificial Sequence
  Synthetic sequence
  MISC_FEATURE (2)..(6): n=1-5
AEAAAKA

SEQ ID NO: 883 - protein, 5 aa, Artificial Sequence
  Synthetic sequence
  MISC_FEATURE (1)..(5): n=1-5
EAAAK

SEQ ID NO: 884 - protein, 5 aa, Artificial Sequence
  Synthetic sequence
PAPAP

SEQ ID NO: 885 - protein, 703 aa, Artificial Sequence
  Synthetic sequence
  MISC_FEATURE (52)..(52): Xaa is Ala or Asn
QVQLVQSGAEVKKPGASVKVSCKASGYSFTTYYMHWVRQAPGQGLEWMGIIXPSGGSTSYAQKFQGRVTMTRDTSTSTVYMELSSLRSEDTAVYYCASGWVYWGQGTLVTVSSASTKGPSVFPLAPSSKSTSGGTAALGCLVKDYFPEPVTVSWNSGALTSGVHTFPAVLQSSGLYSLSSVVTVPSSSLGTQTYICNVNHKPSNTKVDKKVEPKSCDKTHTCPPCPAPEAAGAPSVFLFPPKPKDTLMISRTPEVTCVVVDVSHEDPEVKFNWYVDGVEVHNAKTKPREEQYNSTYRVVSVLTVLHQDWLNGKEYKCKVSNKALPAPIEKTISKAKGQPREPQVYTLPPSREEMTKNQVSLTCLVKGFYPSDIAVEWESNGQPENNYKTTPPVLDSDGSFFLYSKLTVDKSRWQQGNVFSCSVMHEALHNHYTQKSLSLSPGGGGGSGGGGSGGGGSEVQLLESGGGLVQPGGSLRLSCAASGFTFSDFWMHWVRQAPGKGLEWISYISGDSGYTNYADSVKGRFTISRDNSKNTLYLQMNSLRAEDTAVYYCARDRPYYYYMDVWGKGTTVTVSSGGGGSGGGGSGGGGSGGGGSDIQMTQSPSSLSASVGDRVTITCRASQSVSRSLAWYQQKPGKAPKLLIYAASSLQSGVPSRFSGSGSGTDFTLTISSLQPEDFATYYCQQYKSYPVTFGQGTKVEIK

SEQ ID NO: 886 - protein, 214 aa, Artificial Sequence
  Synthetic sequence
DIQMTQSPSSLSASVGDRVTITCQASRDIKNYLAWYQQKPGKAPKLLIYAASSLQSGVPSRFSGSGSGTDFTLTISSLQPEDFATYYCQQSYSTPPTFGPGTKVDIKRTVAAPSVFIFPPSDEQLKSGTASVVCLLNNFYPREAKVQWKVDNALQSGNSQESVTEQDSKDSTYSLSSTLTLSKADYEKHKVYACEVTHQGLSSPVTKSFNRGEC

SEQ ID NO: 887 - protein, 709 aa, Artificial Sequence
  Synthetic sequence
EVQLLESGGGLVQPGGSLRLSCAASGFTFSNSDMSWVRQAPGKGLEWVSGITISGGSTYYADSVKGRFTISRDNSKNTLYLQMNSLRAEDTAVYYCARGRGGSGWLDYWGQGTLVTVSSASTKGPSVFPLAPSSKSTSGGTAALGCLVKDYFPEPVTVSWNSGALTSGVHTFPAVLQSSGLYSLSSVVTVPSSSLGTQTYICNVNHKPSNTKVDKKVEPKSCDKTHTCPPCPAPEAAGAPSVFLFPPKPKDTLMISRTPEVTCVVVDVSHEDPEVKFNWYVDGVEVHNAKTKPREEQYNSTYRVVSVLTVLHQDWLNGKEYKCKVSNKALPAPIEKTISKAKGQPREPQVYTLPPSREEMTKNQVSLTCLVKGFYPSDIAVEWESNGQPENNYKTTPPVLDSDGSFFLYSKLTVDKSRWQQGNVFSCSVMHEALHNHYTQKSLSLSPGGGGGSGGGGSGGGGSEVQLLESGGGLVQPGGSLRLSCAASGFTFSDFWMHWVRQAPGKGLEWISYISGDSGYTNYADSVKGRFTISRDNSKNTLYLQMNSLRAEDTAVYYCARDRPYYYYMDVWGKGTTVTVSSGGGGSGGGGSGGGGSGGGGSDIQMTQSPSSLSASVGDRVTITCRASQSVSRSLAWYQQKPGKAPKLLIYAASSLQSGVPSRFSGSGSGTDFTLTISSLQPEDFATYYCQQYKSYPVTFGQGTKVEIK

SEQ ID NO: 888 - protein, 220 aa, Artificial Sequence
  Synthetic sequence
DIVMTQSPDSLAVSLGERATINCKSSQSVLYSPNNKNYLAWYQQKPGQPPKLLIYWASTRESGVPDRFSGSGSGTDFTLTISSLQAEDVAVYYCQQYYTTPPTFGQGTRLEIKRTVAAPSVFIFPPSDEQLKSGTASVVCLLNNFYPREAKVQWKVDNALQSGNSQESVTEQDSKDSTYSLSSTLTLSKADYEKHKVYACEVTHQGLSSPVTKSFNRGEC
